(19) United States
(12) Patent Application Publication
(10) Pub. No.: US 2007/0224622 A1
(43) Pub. Date: Sep. 27, 2007

(54) Plant chimeric binding polypeptides for universal molecular recognition

(76) Inventor: Jennifer Jones, Kirkwood, MO (US)

Correspondence Address: FISH & RICHARDSON PC, P.O. BOX 1022, MINNEAPOLIS, MN, 55440-1022, US

(21) Appl. No.: 11/706,847

(22) Filed: Feb. 13, 2007

Related U.S. Application Data
(60) Provisional application No. 60/773,086, filed on Feb. 13, 2006.

(51) Int. Cl. C40B 50/06; C40B 40/02; C40B 40/08; C40B 40/10

(52) U.S. Cl. 435/6; 435/69.1; 435/320.1; 435/325; 536/23.2

(57) ABSTRACT

Libraries of nucleic acids encoding chimeric binding polypeptides based on plant scaffold polypeptide sequences. Also described are methods for generating the libraries.

### BACKGROUND

[0001] The binding specificity and affinity of a protein for a target are determined primarily by the protein's amino acid sequence within one or more binding regions. Accordingly, varying the amino acid sequence of the relevant regions reconfigures the protein's binding properties.

[0002] In nature, combinatorial changes in protein binding are best illustrated by the vast array of immunoglobulins produced by the immune system. Each immunoglobulin includes a set of short, virtually unique, amino acid sequences known as hypervariable regions (i.e., protein binding domains), and another set of longer, invariant sequences known as constant regions. The constant regions form β sheets that stabilize the three dimensional structure of the protein in spite of the enormous sequence diversity among hypervariable regions in the population of immunoglobulins. Each set of hypervariable regions confers binding specificity and affinity. The assembly of two heavy chain and two light chain immunoglobulins into a large protein complex (i.e., an antibody) further increases the number of combinations with diverse binding activities.

[0003] The binding diversity of antibodies has been successfully exploited in many biomedical and industrial applications. For example, libraries have been constructed that express immunoglobulins bearing artificially diversified hypervariable regions. Immunoglobulin expression libraries are very useful for identifying high affinity antibodies to a target molecule (e.g., a receptor or receptor ligand). A nucleic acid encoding the identified immunoglobulin can then be isolated and expressed in host cells or organisms.

[0004] However, despite the usefulness of immunoglobulins and antibodies in general, their expression in transgenic plants can be problematic. Immunoglobulins may not fold properly in plant cytoplasm because they require the formation of multiple disulfide bonds. Further, the large size of immunoglobulins prevents their effective uptake by some plant pests. Thus, immunoglobulins are frequently not useful as protein pesticides or pesticide targeting molecules. Finally, expressing mammalian proteins such as immunoglobulins (e.g., as so called “plantibodies”) in edible plants also raises potential issues of consumer acceptance and is thus an impediment to commercialization. This may effectively prevent use of plantibodies for many input and output traits in transgenic plants.

[0005] The above-mentioned disadvantages of immunoglobulins can be circumvented by generating diverse libraries of binding proteins from other classes of structurally tolerant proteins, preferably plant-derived proteins. These libraries can be screened to identify individual proteins that bind with desired specificity and affinity to a target of interest. Afterwards, identified binding proteins can be efficiently expressed in transgenic plants.

### SUMMARY

[0006] Diverse libraries of nucleic acids encoding plant chimeric binding polypeptides, as well as methods for generating them are described herein. The chimeric binding polypeptides are conceptually analogous to immunoglobulins in that they feature highly varied binding domains in the framework of unvarying sequences that encode a structurally robust protein. However, the chimeric binding polypeptides described herein have the considerable advantage of being derived from plant protein sequences thereby avoiding many of the problems associated with immunoglobulin expression in plants. The amino acid sequences of the encoded plant chimeric binding proteins are derived from a scaffold polypeptide sequence that includes subsequences to be varied. The varied subsequences correspond to putative binding domains of the plant chimeric binding polypeptides, and are highly heterogeneous in the library of encoded plant chimeric binding proteins. In contrast the sequence of the encoded chimeric binding proteins outside of the varied subsequences is essentially the same as the parent scaffold polypeptide sequence and highly homogeneous throughout the library of encoded plant chimeric binding proteins. Such libraries can serve as a universal molecular recognition platform to select proteins with high selectivity and affinity binding for expression in transgenic plants.

[0007] Accordingly, one aspect described herein is a library of nucleic acid molecules encoding at least ten (e.g., at least 1,000, 10⁵, or 10⁶) different chimeric binding polypeptides. The amino acid sequence of each polypeptide includes C₁-X₁-C₂-X₂-C₃-X₃-C₄, where C₁-C₄ are backbone subsequences selected from purple acid phosphatase (i.e., SEQ ID NOs: 1-30, 31-60, 61-90, and 91-120, respectively) that can include up to 30 (e.g., 20, 10, or 5) single amino acid substitutions, deletions, insertion, or additions to the selected purple acid phosphatase sequences. The C₁-C₄ subsequences are homogeneous across many of the polypeptides encoded in the library. In contrast to the C₁-C₄ backbone subsequences, the X₁-X₃ subsequences are independent variable subsequences consisting of 2-20 amino acids, and these subsequences are heterogeneous across many of the polypeptides in the library. For example, the library of chimeric polypeptides can have the amino acid sequence of any one of SEQ ID NOs: 124-126 including one to ten single amino acid substitutions, deletions, insertions, or additions to amino acid positions corresponding to 23-39, 51-49, and 79-84 of SEQ ID NOs: 124-126.

[0008] Another aspect described herein is a method for generating the just-described library. The method includes providing a parental nucleic acid encoding a plant scaffold polypeptide sequence containing C₁-X₁-C₂-X₂-C₃-X₃-C₄ as defined above. The method further includes replicating the parental nucleic acid (e.g., at least one of the X₁-X₃ subsequences is selected from SEQ ID NOs: 121-123) under conditions that introduce up to 10 single amino acid substitutions, deletions, insertions, or additions to the parental X₁, X₂, or X₃ subsequences, whereby a heterogeneous population of randomly varied subsequences encoding X₁, X₂, or X₃ is generated. The population varied subsequences is then substituted into a population of parental nucleic acids at the positions corresponding to those encoding X₁, X₂, or X₃. The amino acid substitutions, deletions, insertions or additions can be introduced into the parental nucleic acid subsequences by replication in vitro (e.g., using a purified mutagenic polymerase or nucleotide analogs) or in vivo (e.g., in a mutagenic strain of E. coli). The just-described library can be introduced into a biological replication system (e.g., E. coli or bacteriophage) and amplified.

[0009] A related aspect described herein is another method for generating the above-described library of nucleic acids. The method includes selecting an amino acid sequence containing C₁-X₁-C₂-X₂-C₃-X₃-C₄ as defined above. The method further includes providing a first and second set of oligonucleotides having overlapping complementary sequences. Oligonucleotides of the first set encode the C₁-C₄ subsequences and multiple heterogeneous X₁-X₃ subsequences. Oligonucleotides of the second set are complementary to nucleotide sequences encoding the C₁-C₄ subsequences and multiple heterogeneous X₁-X₃ subsequences. The two sets of oligonucleotides are combined to form a first mixture and incubated under conditions that allow hybridization of the overlapping complementary sequences. The resulting hybridized sequences are then extended to form a second mixture containing the above-described library.

[0010] Yet another aspect of the invention is a library of nucleic acids encoding chimeric binding polypeptides each of which include an amino acid sequence at least 70% (i.e., any percentage between 70% and 100%) identical to any of SEQ ID NOs: 127-129. The amino acid sequence of each of the encoded polypeptides includes amino acids that differ from those of SEQ ID NOs: 127-129 at positions 14, 15, 33, 35-36, 38, 47-48, 66, 68-69, 71, 80, 81, 99, 101-102, and 104, and the amino acid differences are heterogeneous across a plurality of the encoded polypeptides. The amino acid sequence of each of the encoded polypeptides outside of the above-listed positions is homogeneous across a plurality of the encoded chimeric polypeptides.

[0011] A related aspect described herein is a method for generating the just-described library. The method includes selecting an amino acid sequence corresponding to any of SEQ ID NOs: 127-129, in which the selected sequence differs from SEQ ID NOs:127-129 in at least one the above-mentioned positions. The method further includes providing a first and second set of oligonucleotides having overlapping complementary sequences. Oligonucleotides of the first set encode subsequences of the selected amino acid sequence, the subsequences being heterogeneous at the above-mentioned positions. Oligonucleotides of the second set are complementary to nucleotide sequences encoding subsequences of the selected amino acid sequence, the subsequences being heterogeneous at the above-mentioned positions. The two sets of oligonucleotides are combined to form a first mixture and incubated under conditions that allow hybridization of the overlapping complementary sequences. The resulting hybridized sequences are then extended to form a second mixture containing the above-described library.

[0012] Various implementations of the invention can include one or more of the following. For example, each nucleic acid in a library can include a vector sequence. Also featured is any nucleic acid isolated from one of the above-described libraries, as well as the chimeric binding polypeptide encoded by it, in pure form.

[0013] In one implementation, a population of cells (or individual cells selected from the population of cells) is provided which express chimeric binding polypeptides encoded by one of the libraries. Another implementation features a library of purified chimeric binding polypeptides encoded by one the nucleic acid libraries. Yet another implementation provides a population of filamentous phage displaying the chimeric binding polypeptides encoded by one of the nucleic acid libraries.

[0014] In various implementations of methods for generating the above described nucleic acid libraries by oligonucleotide assembly, one or more of the following can be included. For example, the method can further include, after the second mixture that contains the nucleic acid library is generated, performing a cycle of denaturing the population of nucleic acids followed by a hybridization and an elongation step. Optionally, this cycle can be repeated (e.g., up to 100 times). The nucleic acid libraries can be amplified by a polymerase chain reaction that includes a forward and a reverse primer that hybridize to the 5′ and 3′ end sequences, respectively, of all nucleic acids in the library. In one implementation, amino acids to be encoded in variable sequence positions are selected from a subset (e.g., only 4, 6, 8, 10, 12, 14 or 16) of alanine, arginine, asparagine, aspartate, glutamine, glutamate, glycine, histidine, isoleucine, leucine, lysine, methionine, phenylalanine, proline, serine, threonine, tryptophan, tyrosine, cysteine and valine (the 20 naturally occurring amino acids). In other cases 19 of the 20 are used (excludes cysteine). In other cases all 20 are used. In another implementation, the subset of amino acids includes at least one aliphatic, one acidic, one neutral, and one aromatic amino acid (e.g., alanine, aspartate, serine, and tyrosine).

[0015] Described herein is library of nucleic acids encoding at least ten different polypeptides, the amino acid sequence of each polypeptide comprising:

[0016] C₁-X₁-C₂-X₂-C₃-X₃-C₄, wherein: (i) subsequence Cl is selected from SEQ. ID NOs:1-30, subsequence C2 is selected from SEQ ID NOs:31-60, subsequence C3 is selected from SEQ. ID NOs:61-90; subsequence C4 is selected from SEQ. ID NOs:91-120, and each of C1-C4 comprise up to 10 single amino acid substitutions, deletions, insertions, or additions to the selected subsequence; (ii) C1-C4 are homogeneous across a plurality of the encoded polypeptides; (iii) each of X1-X3 is an independently variable subsequence consisting of 2-20 amino acids; and each of X1-X3 are heterogeneous across a plurality of the encoded polypeptides.

[0017] Also described is a library of nucleic acids encoding at least ten different polypeptides, the amino acid sequence of each polypeptide comprising:

[0018] C1-X1-C2-X2-C3-X3-C4, wherein: (i) subsequence Cl is selected from FIG. 2 or FIG. 4, subsequence C2 is selected from FIG. 2 or FIG. 4, subsequence C3 is selected from FIG. 2 or FIG. 4; subsequence C4 is selected from FIG. 2 or FIG. 4, and each of C1-C4 comprise up to 10 single amino acid substitutions, deletions, insertions, or additions to the selected subsequence; (ii) C1-C4 are homogeneous across a plurality of the encoded polypeptides

[0019] (iii) each of X1-X3 is an independently variable subsequence consisting of 2-20 amino acids; and each of X1-X3 are heterogeneous across a plurality of the encoded polypeptides.

[0020] Also described is a library of nucleic acids encoding at least ten different polypeptides, the amino acid sequence of each polypeptide comprising:

[0021] C1-X1-C2-X2-C3-X3-C4, wherein (i) subsequence C1 is selected from FIG. 3 or FIG. 5, subsequence C2 is selected from FIG. 3 or FIG. 5, subsequence C3 is selected from FIG. 3 or FIG. 5; subsequence C4 is selected from FIG. 3 XX, and each of C1-C4 comprise up to 30 single amino acid substitutions, deletions, insertions, or additions to the selected subsequence; (ii) C1-C4 are homogeneous across a plurality of the encoded polypeptides (iii) each of X1-X3 is an independently variable subsequence consisting of 2-20 amino acids; and each of X1-X3 are heterogeneous across a plurality of the encoded polypeptides.

[0022] In various embodiments: at least 1,000 different polypeptides are encoded; at least 100,000 different polypeptides are encoded; at least 1,000,000 different polypeptides are encoded; each of C1-C4 independently comprises up to 20 single amino acid substitutions, deletions, insertions, or additions to the selected subsequence; each of C1-C4 independently comprises up to 10 single amino acid substitutions, deletions, insertions, or additions to the selected subsequence; each of C1-C4 independently comprises up to 5 single amino acid substitutions, deletions, insertions, or additions to the selected subsequence; none of C1-C4 comprise amino acid substitutions, deletions, insertions, or additions to the selected subsequence; amino acids of X1-X3 are selected from fewer than 20 amino acids genetically encoded in plants; amino acids of X1-X3 are selected from all 20 amino acids genetically encoded in plants; the fewer than 20 genetically encoded amino acids include at least one aliphatic amino acid, at least one acidic amino acid, at least one neutral amino acid, and at least one aromatic amino acid; fewer than 20 genetically encoded amino acids comprise alanine, aspartate, serine, and tyrosine.

[0023] In some cases: the amino acid sequence of each polypeptide is selected from:

[0024] (a). a polypeptide comprising C1-X1-C2-X2-C3-X3-C4 wherein C1=SEQ. ID NO:1, C2=SEQ. ID NO: 31, C3=SEQ. ID NO: 61, and C4=SEQ. ID NO: 91;

[0025] (b). a polypeptide comprising C1-X1-C2-X2-C3-X3-C4 wherein C1=SEQ. ID NO:2, C2=SEQ. ID NO: 32, C3=SEQ. ID NO: 62, and C4=SEQ. ID NO: 92; and

[0026] (c). a polypeptide comprising C1-X1-C2-X2-C3-X3-C4 wherein C1=SEQ. ID NO:3, C2=SEQ. ID NO: 33, C3=SEQ. ID NO: 63, and C4=SEQ. ID NO: 93.

[0027] In some cases: each encoded polypeptide comprises C1-X1-C2-X2-C3-X3-C4, wherein C1=SEQ. ID NO: XI, C2=SEQ. ID NO: X2, C3=SEQ. ID NO: X3, and C4=SEQ. ID NO: X4; designated SEQ. ID NO: 130.

[0028] In some cases: each encoded polypeptide comprises C1-X1-C2-X2-C3-X3-C4, wherein C1=SEQ.ID NO: X1, C2=SEQ.ID NO: X2, C3=SEQ.ID NO: X3, and C4=SEQ.ID NO: X4; designated SEQ. ID NO: 130.

[0029] In some embodiments: wherein each of the nucleic acids comprises a vector sequence.

[0030] Also described: are an isolated nucleic acid selected from the library and a isolated cell expressing the nucleic acid as well as a purified library of purified polypeptides encoded by the library; and a population of filamentous phage displaying the polypeptides encoded by the library.

[0031] Described herein is a method of generating a library, comprising: (i) providing a parental nucleic acid encoding a parental polypeptide comprising the amino acid sequence: C1-X1-C2-X2-C3-X3-C4, wherein subsequence C1 is selected from SEQ ID NOs: 1-30, subsequence C2 is selected from SEQ ID NOs:31-60, subsequence C3 is selected from SEQ ID NOs:61-90; subsequence C4 is selected from SEQ ID NOs:91 120; each of C1-C4 comprises up to 10 single amino acid substitutions, deletions, insertions, or additions to the selected subsequence; and each of X1-X3 is an independent subsequence consisting of 2-20 amino acids; (ii) replicating the parental nucleic acid under conditions that introduce up to 10 single amino acid substitutions, deletions, insertions, or additions to the X1, X2, or X3 subsequences, whereby a population of randomly varied subsequences encoding X1′, X2′, or X3′ is generated; and (iii) the population of randomly varied subsequences X1′, X2′, or X3′ is substituted, into a population of parental nucleic acids at the positions corresponding to those that encode X1, X2, or X3.

[0032] In various instances: at least one of the X1-X3 subsequences is selected from SEQ ID NOs: 121-123; each of C1-C4 independently comprises up to 20 single amino acid substitutions, deletions, insertions, or additions to the selected subsequence; each of C1-C4 independently comprises up to 10 single amino acid substitutions, deletions, insertions, or additions to the selected subsequence; each of C1-C4 independently comprises up to 5 single amino acid substitutions, deletions, insertions, or additions to the selected subsequence; none of C1-C4 comprise amino acid substitutions, deletions, insertions, or additions to the selected subsequence; the replicating generates a heterogeneous population of randomly varied subsequences by introducing up to 5 amino acid substitutions in each of X1, X2, or X3; the method further comprises amplifying the library by introducing it into a biological replication system and proliferating the biological replication system; the biological replication system is a plurality of E. coli cells; the biological replication system is a plurality of bacteriophage; the replicating occurs in vitro; the replicating is performed with a purified mutagenic polymerase; the replicating is performed in the presence of a nucleotide analog; the replicating occurs in vivo; the replicating in vivo occurs in a mutagenic species of E. coli.

[0033] Also described is a method of generating the library of claim 1, comprising: (i) selecting an amino acid sequence comprising the amino acid sequence C1-X1-C2-X2 C3 X3-C4 to be encoded, wherein: (a) subsequence C1 is selected from SEQ ID NOs:1-30, subsequence C2 is selected from SEQ ID NOs:31-60, subsequence C3 is selected from SEQ ID NOs:61 90, and subsequence C4 is selected from SEQ ID NOs:91-120; (b) each of C1-C4 comprises up to 10 single amino acid substitutions, deletions, insertions, or additions to the selected subsequence; (c) each of X1, X2, and X3 consists of an amino acid sequence 2-20 amino acids in length; (ii) providing a first plurality and a second plurality of oligonucleotides, wherein: (a) oligonucleotides of the first plurality encode the C1-C4 subsequences and multiple heterogeneous X1-X3 variant subsequences X1′-X3′; (b) oligonucleotides of the second plurality are complementary to nucleotide sequences encoding the C1-C4 subsequences and to nucleotide sequences encoding multiple heterogeneous X1′ X3′ subsequences; and (c) the oligonucleotides of the first and second pluralities have overlapping sequences complementary to one another; (iii) combining the population of oligonucleotides to form a first mixture; (iv) incubating the mixture under conditions effective for hybridizing the overlapping complementary sequences to form a plurality of hybridized complementary sequences; and (v) elongating the plurality of hybridized complementary sequences to form a second mixture containing the library.

[0034] In various instances: each of C1-C4 independently comprises up to 20 single amino acid substitutions, deletions, insertions, or additions to the selected subsequence; each of C1-C4 independently comprises up to 10 single amino acid substitutions, deletions, insertions, or additions to the selected subsequence; each of C1-C4 independently comprises from zero and up to 5 single amino acid substitutions, deletions, insertions, or additions to the selected subsequence; the method further comprises performing a cycle of steps, the cycle of steps comprising denaturing the library by increasing the temperature of the second mixture to a temperature effective for denaturing double stranded DNA, followed by steps (iv) and (v); the method comprises repeating the cycle of steps up to 100 times; the method further comprises amplifying the library by a polymerase chain reaction consisting essentially of the library, a forward primer, and a reverse primer, wherein the forward and reverse primers can hybridize to the 5′ and 3′ end sequences, respectively, of all nucleic acids in the library; the amino acid to be encoded in each position of the X1, X2, or X3 subsequences, is selected from a subset of alanine, arginine, asparagine, aspartate, cysteine, glutamine, glutamate, glycine, histidine, isoleucine, leucine, lysine, methionine, phenylalanine, proline, serine, threonine, tryptophan, tyrosine, and valine; herein the amino acid selected for each single amino acid substitution is selected from a group of amino acids consisting of at least one aliphatic, at least one one acidic, at least one one neutral, and at least one one aromatic amino acid; and the group of amino acids consists of alanine, aspartate, serine, and tyrosine.

[0035] Also described herein is a method of generating a library, comprising: (i) providing a parental nucleic acid encoding a parental polypeptide comprising the amino acid sequence: C1-X1-C2-X2-C3-X3-C4, wherein subsequence C1 is selected from FIG. 2 or FIG. 4, subsequence C2 is selected from FIG. 2 or FIG. 4, subsequence C3 is selected from FIG. 2 or FIG. 4; subsequence C4 is selected from FIG. 2 or FIG. 4 each of C1-C4 comprises up to 10 single amino acid substitutions, deletions, insertions, or additions to the selected subsequence; and each of X1-X3 is an independent subsequence consisting of 2-20 amino acids; (ii) replicating the parental nucleic acid under conditions that introduce up to 10 single amino acid substitutions, deletions, insertions, or additions to the X1, X2, or X3 subsequences, whereby a population of randomly varied subsequences encoding X1′, X2′, or X3′ is generated; and (iii) the population of randomly varied subsequences X1′, X2′, or X3′ is substituted, into a population of parental nucleic acids at the positions corresponding to those that encode X1, X2, or X3.

[0036] In various embodiments: at least one of the X1-X3 subsequences is selected from SEQ ID NOs: 121-123; each of C1-C4 independently comprises up to 20 single amino acid substitutions, deletions, insertions, or additions to the selected subsequence; each of C1-C4 independently comprises up to 10 single amino acid substitutions, deletions, insertions, or additions to the selected subsequence; each of C1-C4 independently comprises up to 5 single amino acid substitutions, deletions, insertions, or additions to the selected subsequence; none of C1-C4 comprise an amino acid substitutions, deletions, insertions, or additions to the selected subsequence; the replicating generates a heterogeneous population of randomly varied subsequences by introducing up to 5 amino acid substitutions in each of X1, X2, or X3; the method further comprises amplifying the library by introducing it into a biological replication system and proliferating the biological replication system; the biological replication system is a plurality of E. coli cells; the biological replication system is a plurality of bacteriophage; the replicating occurs in vitro; the replicating is performed with a purified mutagenic polymerase the replicating is performed in the presence of a nucleotide analog; the replicating occurs in vivo; and the replicating in vivo occurs in a mutagenic species of E. coli.

[0037] Also described is a method of generating the library, comprising: (i) selecting an amino acid sequence comprising C1-X1-C2-X2 C3 X3-C4 to be encoded, wherein (a) subsequence C1 is selected from FIG. 2 or FIG. 4, subsequence C2 is selected from FIG. 2 or FIG. 4, subsequence C3 is selected from FIG. 2 or FIG. 4, and subsequence C4 is selected from FIG. 2 or FIG. 4; (b) each of C1-C4 comprises up to 10 single amino acid substitutions, deletions, insertions, or additions to the selected subsequence; (c) each of X1, X2, and X3 consists of an amino acid sequence 2-20 amino acids in length; (ii) providing a first plurality and a second plurality of oligonucleotides, wherein (a) oligonucleotides of the first plurality encode the C1-C4 subsequences and multiple heterogeneous X1-X3 variant subsequences X1′-X3′; (b) oligonucleotides of the second plurality are complementary to nucleotide sequences encoding the C1-C4 subsequences and to nucleotide sequences encoding multiple heterogeneous X1′ X3′ subsequences; and

[0038] (c) the oligonucleotides of the first and second pluralities have overlapping sequences complementary to one another; (iii) combining the population of oligonucleotides to form a first mixture; (iv) incubating the mixture under conditions effective for hybridizing the overlapping complementary sequences to form a plurality of hybridized complementary sequences; and (v) elongating the plurality of hybridized complementary sequences to form a second mixture containing the library.

[0039] In various cases: each of C1-C4 independently comprises up to 20 single amino acid substitutions, deletions, insertions, or additions to the selected subsequence; each of C1-C4 independently comprises up to 10 single amino acid substitutions, deletions, insertions, or additions to the selected subsequence; each of C1-C4 independently comprises from zero and up to 5 single amino acid substitutions, deletions, insertions, or additions to the selected subsequence; the method further comprises performing a cycle of steps, the cycle of stepscomprising denaturing the library by increasing the temperature of the second mixture to a temperature effective for denaturing double stranded DNA, followed by steps (iv) and (v); the method further comprises repeating the cycle of steps up to 100 times; the method further comprises amplifying the library by a polymerase chain reaction consisting essentially of the library, a forward primer, and a reverse primer, wherein the forward and reverse primers can hybridize to the 5′ and 3′ end sequences, respectively, of all nucleic acids in the library; the amino acid to be encoded in each position of the X1, X2, or X3 subsequences, is selected from a subset of alanine, arginine, asparagine, aspartate, cysteine, glutamine, glutamate, glycine, histidine, isoleucine, leucine, lysine, methionine, phenylalanine, proline, serine, threonine, tryptophan, tyrosine, and valine; the amino acid selected for each single amino acid substitution is selected from a group of amino acids consisting of at least one aliphatic, at least one acidic, one at least one neutral, and at least one aromatic amino acid; and the group of amino acids consists of alanine, aspartate, serine, and tyrosine.

[0040] Also disclosed is a method of generating the library, comprising: (i) providing a parental nucleic acid encoding a parental polypeptide comprising the amino acid sequence: C1-X1-C2-X2-C3-X3-C4, wherein subsequence C1 is selected from FIG. 3 or FIG. 5, subsequence C2 is selected from FIG. 3 or FIG. 5, subsequence C3 is selected from FIG. 3 or FIG. 5; subsequence C4 is selected from FIG. 3 or FIG. 5; each of C1-C4 comprises up to 10 single amino acid substitutions, deletions, insertions, or additions to the selected subsequence; and each of X1-X3 is an independent subsequence consisting of 2-20 amino acids; (ii) replicating the parental nucleic acid under conditions that introduce up to 10 single amino acid substitutions, deletions, insertions, or additions to the X1, X2, or X3 subsequences, whereby a population of randomly varied subsequences encoding X1′, X2′, or X3′ is generated; and (iii) the population of randomly varied subsequences X1′, X2′, or X3′ is substituted, into a population of parental nucleic acids at the positions corresponding to those that encode X1, X2, or X3.

[0041] In various instances: at least one of the X1-X3 subsequences is selected from SEQ ID NOs: 121-123; each of C1-C4 independently comprises up to 20 single amino acid substitutions, deletions, insertions, or additions to the selected subsequence; each of C1-C4 independently comprises up to 10 single amino acid substitutions, deletions, insertions, or additions to the selected subsequence; each of C1-C4 independently comprises up to 5 single amino acid substitutions, deletions, insertions, or additions to the selected subsequence; none of C1-C4 comprise amino acid substitutions, deletions, insertions, or additions to the selected subsequence; the replicating generates a heterogeneous population of randomly varied subsequences by introducing up to 5 amino acid substitutions in each of X1, X2, or X3; the method further comprises amplifying the library by introducing it into a biological replication system and proliferating the biological replication system; the biological replication system is a plurality of E. coli cells; the biological replication system is a plurality of bacteriophage; the replicating occurs in vitro; the replicating is performed with a purified mutagenic polymerase; the replicating is performed in the presence of a nucleotide analog; the replicating occurs in vivo; and the replicating in vivo occurs in a mutagenic species of E. coli.

[0042] Also described is a method of generating the library, comprising: (i) selecting an amino acid sequence comprising: C1-X1-C2-X2 C3 X3-C4 to be encoded, wherein (a) subsequence C1 is selected from FIG. 3 or FIG. 5, subsequence C2 is selected from FIG. 3 or FIG. 5, subsequence C3 is selected from FIG. 3 or FIG. 5, and subsequence C4 is selected from FIG. 3 or FIG. 5; (b) each of C1-C4 comprises up to 10 single amino acid substitutions, deletions, insertions, or additions to the selected subsequence; (c) each of X1, X2, and X3 consists of an amino acid sequence 2-20 amino acids in length; (ii) providing a first plurality and a second plurality of oligonucleotides, wherein (a) oligonucleotides of the first plurality encode the C1-C4 subsequences and multiple heterogeneous X1-X3 variant subsequences X1′-X3′; (b) oligonucleotides of the second plurality are complementary to nucleotide sequences encoding the C1-C4 subsequences and to nucleotide sequences encoding multiple heterogeneous X1′ X3′ subsequences; and (c) the oligonucleotides of the first and second pluralities have overlapping sequences complementary to one another; (iii) combining the population of oligonucleotides to form a first mixture; (iv) incubating the mixture under conditions effective for hybridizing the overlapping complementary sequences to form a plurality of hybridized complementary sequences; and (v) elongating the plurality of hybridized complementary sequences to form a second mixture containing the library.

[0043] In various embodiments: each of C1-C4 comprises up to 20 single amino acid substitutions, deletions, insertions, or additions to the selected subsequence; each of C1-C4 independently comprises up to 10 single amino acid substitutions, deletions, insertions, or additions to the selected subsequence; each of C1-C4 independently comprises from zero and up to 5 single amino acid substitutions, deletions, insertions, or additions to the selected subsequence; the method further comprises performing a cycle of steps, the cycle comprising denaturing the library by increasing the temperature of the second mixture to a temperature effective for denaturing double stranded DNA, followed by steps (iv) and (v); the method further comprises repeating the cycle up to 100 times; the method further comprises amplifying the library by a polymerase chain reaction consisting essentially of the library, a forward primer, and a reverse primer, wherein the forward and reverse primers can hybridize to the 5′ and 3′ end sequences, respectively, of all nucleic acids in the library; the amino acid to be encoded in each position of the X1, X2, or X3 subsequences, is selected from a subset of alanine, arginine, asparagine, aspartate, cysteine, glutamine, glutamate, glycine, histidine, isoleucine, leucine, lysine, methionine, phenylalanine, proline, serine, threonine, tryptophan, tyrosine, and valine the amino acid selected for each single amino acid substitution is selected from a group of amino acids consisting of at least one aliphatic, one acidic, one neutral, and one aromatic amino acid; and the group of amino acids consists of alanine, aspartate, serine, and tyrosine.

[0044] Also described is a library of nucleic acids encoding at least ten different polypeptides, wherein: (i) the amino acid sequence of each of the encoded polypeptides comprises an amino acid sequence at least 70% identical to any of SEQ ID NOs:127-129; (ii) the amino acid sequence of each of the encoded polypeptides includes amino acids that differ from those of SEQ ID NOs:127-129 at positions 14, 15, 33, 35-36, 38, 47-48, 66, 68-69, 71, 80, 81, 99, 101-102, and 104, and the amino acid differences are heterogeneous across a plurality of the encoded polypeptides; and (iii) the amino acid sequence of each of the encoded polypeptides outside of the residues corresponding to positions 14, 15, 33, 35-36, 38, 47-48, 66, 68-69, 71, 80, 81, 99, 101-102, and 104 of SEQ ID NOs: 127-129 is homogeneous across a plurality of the encoded polypeptides.

[0045] In various embodiments: the amino acid sequence of the polypeptides has at least 75% identity to any of SEQ ID NOs 127-129; the amino acid sequence of the polypeptides has at least 80% identity to any of SEQ ID NOs 127-129; and the amino .acid sequence of the polypeptides has at least 85% identity to any of SEQ ID NOs 127-129 each of the nucleic acids comprises a vector sequence. Also disclosed: an isolated nucleic acid encoding a polypeptide, selected from the library; a purified polypeptide encoded by the nucleic acid; a population of cells expressing the polypeptides encoded by the library; a cell selected from the population of cells; a purified library of polypeptides encoded by the library; a population of filamentous phage displaying the library of polypeptides encoded by the library.

[0046] Also disclosed is a method of generating the library, comprising: (i) selecting an amino acid sequence corresponding to any one of SEQ ID NOs: 127 129 to be encoded, wherein the selected sequence differs from those of SEQ ID NOs: 127-129 in at least one of variable positions 14, 15, 33, 35-36, 38, 47-48, 66, 68-69, 71, 80, 81, 99, 101-102, and 104; (ii) chemically providing a first and a second plurality of oligonucleotides, wherein (a) oligonucleotides of the first plurality encode amino acid subsequences of the selected amino acid sequence; the subsequences being heterogeneous at the encoded variable positions; (b) oligonucleotides of the second plurality are complementary to nucleotide sequences encoding subsequences of the selected amino acid sequence, the subsequences being heterogeneous at the encoded variable positions; and (c) the first and second pluralities comprise oligonucleotides have overlapping sequences complementary to one another; (iii) combining the population of oligonucleotides to form a first mixture; (iv) incubating the mixture under conditions effective for hybridizing the overlapping complementary sequences to form a plurality of hybridized complementary sequences; and (v) elongating the plurality of hybridized complementary sequences to form a second mixture containing the library.

[0047] In various instances: the method further comprises performing a cycle of denaturing the library by increasing the temperature of the second mixture to a temperature effective for denaturing double stranded DNA, followed by steps (iv) and (v); the method further comprises repeating the cycle up to 100 times; the method further comprises amplifying the library by a polymerase chain reaction consisting essentially of the library, a forward primer, and a reverse primer, wherein the forward and reverse primers can hybridize to the 5′ and 3′ end sequences, respectively, of all nucleic acids in the library; the amino acids to be encoded for the variable positions, are selected from a subset of alanine, arginine, asparagine, aspartate, cysteine, glutamine, glutamate, glycine, histidine, isoleucine, leucine, lysine, methionine, phenylalanine, proline, serine, threonine, tryptophan, tyrosine, and valine the amino acids selected for the variable positions are selected from a group consisting of an aliphatic, an acidic, a neutral, and an aromatic amino acid; the group of amino acids consists of alanine, aspartate, serine, and tyrosine.

[0048] The details of one or more embodiments of the invention are set forth in the description below. Other features, objects, and advantages of the invention will be apparent from the description and drawings, and from the claims.

### DESCRIPTION OF DRAWINGS

[0049] FIG. 1 is a schematic representation depicting the generation of a library of nucleic acids encoding chimeric binding polypeptides by diversifying subsequences within an encoded polypeptide scaffold sequence.

[0050] FIG. 2 is an alignment of the sequences of a number of proteins that have regions which can be used as a scaffold. These proteins are homologous to oryzacystatin. The C1, C2, C3 and C4 are boxed and labeled.

[0051] FIG. 3 is an alignment of the sequences of a number of proteins that have regions which can be used as a scaffold. These proteins are homologous to C2. The C1, C2, C3 and C4 are boxed and labeled.

[0052] FIG. 4 is an alignment of the sequences of a number of proteins that have regions which can be used as a scaffold. These proteins are homologous to oryzacystatin. The C1, C2, C3 and C4 are boxed and labeled.

[0053] FIG. 5 is an alignment of the sequences of a number of proteins that have regions which can be used as a scaffold. These proteins are homologous to C2. The C1, C2, C3 and C4 are boxed and labeled.

### DETAILED DESCRIPTION

[0054] Diverse libraries of nucleic acids (e.g., cDNA libraries) encoding plant chimeric binding polypeptides, as well as methods for generating them are described below. The amino acid sequences of the library of encoded plant chimeric binding proteins are derived from a scaffold polypeptide sequence that includes subsequences to be varied. The varied subsequences correspond to putative binding domains of the plant chimeric binding proteins, and are highly heterogeneous in the library of plant chimeric binding proteins. In contrast, the sequence of the encoded chimeric binding proteins outside of the varied subsequences is essentially the same as the parent scaffold polypeptide sequence and highly homogeneous throughout the library of encoded plant chimeric binding proteins. Thus, libraries of plant chimeric binding proteins can serve as a universal molecular recognition library platform for selection of specialized binding proteins for expression in transgenic plants. Libraries of plant chimeric binding proteins can be expressed by transfected cells (i.e., as expression libraries) and tested for interaction with a molecular target of interest. For example, expression libraries can be screened to identify polypeptides that bind with high specificity and affinity to polypeptides expressed by plant pests, including nematodes. Ultimately, individual chimeric binding proteins with desired target binding properties can be expressed in a transgenic plant.

I. Plant Scaffold Polypeptide Sequences

[0055] A plant scaffold polypeptide sequence is an amino acid sequence based on a plant protein that is structurally tolerant of extreme sequence variation within one or more regions. The regions to be varied within the scaffold polypeptide sequence are conceptually analogous to the hypervariable regions of immunoglobulins, and form putative binding domains in a chimeric binding polypeptide. Thus, a large library of nucleic acid sequences encoding diverse plant chimeric binding polypeptides is produced by diversifying specific sequences within a scaffold polypeptide sequence, as is described in detail below.

[0056] Plant scaffold polypeptide sequences are selected to have a number of properties, e.g., they: (i) are derived from sequences that are of plant origin; (ii) encode proteins that tolerate the introduction of sequence diversity structurally; (iii) only contain disulfide bonds that do not interfere with folding of the polypeptide when expressed in a plant; (iv) express at high levels in diverse plant tissues; and (v) can be targeted to different subcellular locations (e.g., cytoplasm, mitochondria, plastid) or secreted from the cell. Based on these properties, plant scaffold polypeptide sequences permit the generation of large libraries of chimeric binding polypeptides with highly diverse binding activities. Libraries of chimeric binding polypeptides can be screened for binding to a target molecule. Chimeric binding proteins having the desired binding activity can subsequently be expressed in plants to confer input traits (e.g., pest or pathogen resistance, drought tolerance) or output traits (e.g. modified lipid composition, heavy metal binding for phytoremediation, medicinal uses). Such binding proteins can also be used in various affinity-based applications, e.g., diagnostic detection of an antigen using a sandwich ELISA; histochemical detection of antigens; generation of protein biochips; and affinity purification of antigens.

[0057] It is helpful to select the scaffold polypeptide sequence based on the sequence of a plant protein or protein domain of known three dimensional structure (see, e.g., Nygren et al. (2004) “Binding Proteins from Alternative Scaffolds,” J. of Immun. Methods 290:3-28). However, even without experimentally determined structural data for a potential scaffold polypeptide sequence, valuable inferences can be gleaned from computational structural analysis of a candidate amino acid sequence. Useful programs for structure prediction from an amino acid sequence include, e.g., the “SCRATCH Protein Predictor” suite of programs available to the public on the world wide web at ics.uci.edu/˜baldig/scratch/index. It is important that introduction of sequence variation not destabilize the known or predicted secondary structure of the scaffold polypeptide sequence. Accordingly, the known or predicted secondary structure of the scaffold polypeptide sequence informs the selection of amino acid subsequences that can be varied within a scaffold polypeptide sequence to form putative binding domains. The structural adequacy of a particular scaffold polypeptide sequence can be readily tested, e.g., by phage display expression analysis methods that are commonly known in the art. For example, a scaffold polypeptide sequence containing 0, 1, 2, 3, or more disulfide bonds can be tested for its ability to fold into a stable protein. Since proteins that do not fold properly will not be incorporated into a phage coat, they will not be displayed. Thus, without undue effort, many candidate scaffold polypeptide sequences can be rapidly screened for their ability to fold into stable proteins once expressed.

[0058] The plant scaffold polypeptide sequences can be based on the accessory domain from purple acid phosphatases (PAPs). The crystal structure of the PAP accessory domain of kidney bean, Phaseolus vulgaris, has been determined (Strater et al. (1995), Science 268(5216):1489-1492). Three exposed loops within the protein are reminiscent of the hypervariable domains found in immunoglobulins. The loops are brought together by the rigid anti-parallel β-sheet framework of the protein. The subsequences that form each loop form the putative binding domains of a chimeric binding protein derived from a PAP. These subsequences are diversified by substituting, deleting, inserting, or adding up to 10 (e.g., up to 3, 4, 6, 8) amino acids. The loops that form the putative binding domains are particularly well suited to binding target molecules containing pockets or clefts.

[0059] PAP-based scaffold polypeptide sequences take the general form:
C₁-X₁-C₂-X₂-C₃-X₃-C₄
where C₁, C₂, C₃, and C₄ correspond to “backbone” subsequences which can include some introduced variation, but are not highly diversified. On the other hand, X₁, X₂, and X₃ correspond to highly varied subsequences that form the putative binding domains of each PAP-based chimeric binding protein. Table 1 shows a list of suitable C₁-C₄ backbone subequences derived from the amino acid sequences of 30 PAPs.

[0060] C₁, C₂, C₃, and C₄ correspond to SEQ ID NOs: 1-30, 31-60, 61-90, and 91-120, respectively, in Table 1.

[0061] X₁, X₂, and X₃ can be based on naturally occurring variants of corresponding PAP sequences, e.g., those shown in Table 2 as SEQ ID NOs: 121-123. Table 2 shows the range variation at each amino acid position in subsequences corresponding, respectively, to X₁, X₂, and X₃, within 30 naturally occurring PAP sequences. Alternatively, the parent variable subsequences, X₁,-X₃, can be arbitrary sequences 2-20 amino acids in length.

[0062] In some implementations, C₁, C₂, C₃, and C₄ of a scaffold polypeptide sequence can be selected from multiple PAP-based scaffold polypeptide sequence sequences listed in Table 1, in any combination, e.g., C_{1(SEQ ID NO:5)}, C_{2(SEQ ID NO:12)}, C_{3(SEQ ID NO:7)}, and C_{4(SEQ ID NO:19)}; C_{1(SEQ ID NO:5)}, C_{2(SEQ ID NO:12)}, C_{3(SEQ ID NO:5)}, and C_{4(SEQ ID NO:12)}; C_{4(SEQ ID NO:22)}; C_{1(SEQ ID NO:17)}, C_{2(SEQ ID NO:17)}, C_{3(SEQ ID NO:19)}, and C_{4(SEQ ID NO:1)}, and so forth.

TABLE 1
SPSs Based on the Accessory Domain of PAPs

| Seq | | Seq | |
|---|---|---|---|
| ID | C₁ | ID | C₂ |
| 1 | PQQVHITQGDHVGKAVIVSWVT | 31 | VVVYWSENSKYKKSAEGTVTT |
| 2 | PQQVHITQGDLVGKAVIVSWVT | 32 | EVHYWSENSDKKKIAEGKLVT |
| 3 | PQQVHITQGDLVGRANIISWVT | 33 | AVRYWSEKNGRKRIAKGKMST |
| 4 | PQQVHITQGDLVGKAVIVSWVT | 34 | EVHYWSENSDKKKIAEGKLVT |
| 5 | PQQVHITQGDHVGKAVIVSWVT | 35 | AVRYWSKNSKQKRLAKGKIVT |
| 6 | PQQVHITQGDHVGKAMIVSWVT | 36 | KVVYWSENSQHKKVAKGNIRT |
| 7 | PQQVHITQGDHVGKAMIVSWVT | 37 | KVVYWSENSQHKKVARGNIRT |
| 8 | PQQVHITQGDHEGKTVIVSWVT | 38 | TVLYWSEKSKQKNTAKGKVTT |
| 9 | PQQVHITQGDLVGQAMIISWVT | 39 | QVIYWSDSSLQNFTAEGEVFT |
| 10 | PQQVHITQGDLVGQAMIISWVT | 40 | QVIYWSDSSLQNFTAEGEVFT |
| 11 | PQQVHITQGDHVGKAMIVSWVT | 41 | TVLYWSNNSKQKNKATGAVTT |
| 12 | PQQVHITQGDLEGEAMIISWVR | 42 | KVLYWIDGSNQKHSANGKITK |
| 13 | PQQVHITQGDHVGKAVIVSWVT | 43 | TVVYWSEKSKLKNKANGKVTT |
| 14 | PQQVHITQGDHVGQAMIISWVT | 44 | EVIYWSNSSLQNFTAEGEVFT |
| 15 | PQQVYITQGDHEGKGVIASWTT | 45 | SVLYWAENSNVKSSAEGFVVS |
| 16 | PQQVHITQGDYEGKGVIISWVT | 46 | TVVYWAENSSVKRRADGVVVT |
| 17 | PQQVHITQGDLVGRAMIISWVT | 47 | AVRYWSEKNGRKRIAKGKMST |
| 18 | PQQVHLTQGDHVGKGVIVSWVT | 48 | KVLYWEFNSKIKQIAKGTVST |
| 19 | PQQVHITQGDVEGKAVIVSWVT | 49 | KVIYWKENSTKKHKAHGKTNT |
| 20 | PQQVHVTQGNHEGNGVIISWVT | 50 | TVRYWCENKKSRKQAEATVNT |
| 21 | PQQVHVTQGNHEGNGVIISWVT | 51 | TVQYWCENEKSRKQAEATVNT |
| 22 | PQQVHITQGDYDGKAVIVSWVT | 52 | KVQFGTSENKFQTSAEGTVSN |
| 23 | PQQVHITQGDHEGRSIIVSWIT | 53 | TVFYGTSENKLDQHAEGTVTM |
| 24 | PQQVHITLGDQTGTAMTVSWVT | 54 | TVRYGSSPEKLDRAAEGSHTR |
| 25 | PQQVHITQGDYDGKAVIVSWVT | 55 | EVVYGTSPNSYDHSAQGKTTN |
| 26 | PQQVHITQGDYDGKAVIISWVT | 56 | HIQYGTSENKFQTSEEGTVTN |
| 27 | PQQVHITQGDYDGEAVIISWVT | 57 | EVRYGLSEGKYDVTVEGTLNN |
| 28 | PQQVHITQGDYDGKAVIISWVT | 58 | QVHYGAVQGKYEFVAQGTYHN |
| 29 | PQQVHITQGDYDGKAVIISWVT | 59 | QVHYGAVQGKYEFVAQGTYHN |
| 30 | PQQVHITQGDYNGKAVIVSWVT | 60 | EVLYGKNEHQYDQRVEGTVTN |
| Seq | | Seq | |
| ID | C₃ | ID | C₄ |
| 61 | YIHHCYIKGLEYDTKYYYV | 91 | SREFWFR |
| 62 | FIHHTTIRNLEYKTKYYYE | 92 | TRQFWFV |
| 63 | FIHHTTIRKLKYNTKYYYE | 93 | TRRFSFI |
| 64 | FIHHTTIRNLEYKTKYYYE | 94 | TRQFWFV |
| 65 | FIHHTTIRNLEYNTKYYYE | 95 | TRQFWFV |
| 66 | YIHHCTIRNLEYNTKYYYE | 96 | TRSFWFT |
| 67 | YINHCTIRNLEYNTKYYYE | 97 | TRSFWFT |
| 68 | YIHHSTIRHLEFNTKYYYK | 98 | ARTFWFV |
| 69 | FIHHTTITNLEFDTTYYYE | 99 | TRQFWFI |
| 70 | FIHHTTITNLEFDTTYYYE | 100 | TRQFWFI |
| 71 | YIHHCIIKHLKFNTKYYYE | 101 | PRTFWFV |
| 72 | FIHHCTIRRLKHNTKYHYE | 102 | VRSFWFM |
| 73 | YIHHCNIKNLKFDTKYYYK | 103 | ARTFWFT |
| 74 | FIHHTNITNLEFNTTYFYV | 104 | TRQFWFI |
| 75 | YIHHCTIKDLEFDTKYYYE | 105 | TRKFWFV |
| 76 | YIHHCTIKDLEYDTKYYYE | 106 | KRQFWFV |
| 77 | YIHHCTIKNLEYNTKYFYE | 107 | TRQFWFT |
| 78 | YIHHCTIQNLKYNTKYYYM | 108 | RRTFWFV |
| 79 | FIHHCPIRNLEYDTKYYYV | 109 | ERKFWFF |
| 80 | YIHHCLIDDLEFDTKYYYE | 110 | SRRFWFF |
| 81 | YIHHCLIDDLEFDTKYYYE | 111 | SRRFWFF |
| 82 | YVHHCLIEGLEYKTKYYYR | 112 | SREFWFE |
| 83 | YIHHCVLTDLKYDRKYFYK | 113 | ARLFWFK |
| 84 | FIHHCTLTGLTHATKYYYA | 114 | VRTFSFT |
| 85 | YINHCLLDKLEYDTKYYYK | 115 | AREFWFH |
| 86 | YIHHCLIEGLEYETKYYYR | 116 | SREFWFK |
| 87 | YIHQCLVTGLQYDTKYYYE | 117 | ARKFWFE |
| 88 | FIHHCLVSDLEHDTKYYYK | 118 | SREFWFV |
| 89 | FIHHCLVSDLEHDTKYYYK | 119 | SREFWFV |
| 90 | YIHHCLVDGLEYNTKYYYK | 120 | AREFWFE |

[0063] TABLE 2
Naturally Occurring Residue Variation in PAP Subsequences
Corresponding to X1, X2, and X3 (SEQ ID NOs:121-123)

| | | |
|---|---|---|
| X₁ | X₂ | X₃ |
| (SEQ ID NO:121) | (SEQ ID NO:122) | (SEQ ID NO:123) |
| Position | Position | Position |

| | | | | | | | | | | | | | | | | | | | | | |
|---|---|---|---|---|---|---|---|---|---|---|---|---|---|---|---|---|---|---|---|---|---|
| a | b | c | d | e | f | g | a | b | c | d | e | f | g | h | i | a | b | c | d | e | f |

| | | | | | | | | | | | | | | | | | | | | | |
|---|---|---|---|---|---|---|---|---|---|---|---|---|---|---|---|---|---|---|---|---|---|
| M | D | E | P | G | S | S | Y | K | Y | Y | N | Y | T | S | G | V | G | L | R | N | T |
| V | E | A | K | | P | N | | R | F | F | T | | S | | P | I | E | I | G | H | |
| E | N | K | L | | K | K | | T | | H | K | | N | | | L | | V | E | D | |
| P | V | D | | | | T | | F | | | D | | K | | | M | | E | D | Q | |
| Q | S | | | | H | | | | | | E | | E | | | | | T | | K | |
| T | I | | | | T | | | | | | | | | | | | | S | | S | |
| A | A | | | | | | | | | | | | | | | | | E | | E | |
| F | | | | | | | | | | | | | | | | | | F | | | |
| | | | | | | | | | | | | | | | | | | K | | | |

[0064] After diversification of the above-listed subsequences of the scaffold polypeptide sequence, the diversified X₁′, X₂′, and X₃′ subsequences are highly heterogeneous within the library of encoded plant chimeric binding polypeptides, and can each contain up to 10 (e.g., 8, 6, 4, 3) single amino acid substitutions, deletions, insertions, or additions with respect to SEQ ID NOs: 121-123 listed in Tables 1, respectively (see, e.g., FIG. 1). For example, the length of the amino acid sequences corresponding to regions X₁, X₂, or X₃ can be unaltered, shortened, or lengthened relative to SEQ ID NOs: 121-123.

[0065] The regions outside of the putative binding domains are referred to as “backbone” regions (i.e., C₁, C₂, C₃, and C₄). Unlike the amino acid sequences for X₁, X₂, and X₃, the amino acid sequences of the backbone regions are generally not substantially diversified within the library of encoded chimeric binding proteins, although some sequence variation in these regions within the library is permissible. The backbone regions of a plant scaffold polypeptide sequence can be at least 70% (i.e., 80, 85, 90, 95, 98, or 100%) identical to any of SEQ ID NOs: 1-120. Alternatively, the backbone regions can contain up to 30 (i.e., 28, 26, 24, 22, 20, 18, 17, 16, 15, 14, 13, 12, 11, 10, 9, 8, 7, 6, 5, 4, 3, 2, or 1) single amino acid substitutions, deletions, insertions or additions. For example, C₁, C₂, C₃, and C₄ can each include 0, 1, 2, 3, 4, or 5 or more single amino acid changes. If amino acid substitutions are to be introduced into the backbone regions, it is preferable to make conservative substitutions. A conservative substitution is one that preserves the substitutes an amino acid with one that has similar chemical properties (e.g., substitution of a polar amino acid such as serine with another polar amino acid such as threonine).

[0066] In one embodiment, the plant scaffold polypeptide sequence is one of SEQ ID NOs: 124-126 shown below. Sequences corresponding to X₁, X₂, and X₃ are in bold and underlined.

SEQ ID NO:124

PQQVHITQGDHVGKAVIVSWVTMDEPGSSVVVYWSENSKYKKSAEGTVTT
YRFYNYTSGYIHHCYIKGLEYDTKYYYVVGIGNTSREFWFR

SEQ ID NO:125

PQQVHITQGDLVGKAVIVSWVTVDEPGSSEVHYWSENSDKKKIAEGKLVT
YRFFNYSSGFIHHTTIRNLEYKTKYYYEVGLGNTTRQFWFV

SEQ ID NO:126

PQQVHITQGDLVGRAMIISWVTMDEPGSSAVRYWSEKNGRKRIAKGKMST
YRFFNYSSGFIHHTTIRKLKYNTKYYYEVGLRNTTRRFSFI

[0067] In other embodiments, a plant scaffold polypeptide sequence is based on the amino acid sequence of plant proteins that have ankyrin-like repeats. Ankryin-like repeats are small turn-helix-helix (THH) repeats consisting of approximately 33 amino acids. The number of THH repeats within a scaffold polypeptide sequence can vary from 2 to 20. The putative binding sites within the THH repeats are typically non-contiguous, but clustered on the same side of the protein of which they are a part.

[0068] A plant THH repeat-containing scaffold polypeptide sequence can have an amino acid sequence that is based on any of SEQ ID NOs: 127-129 listed below. High levels of amino acid sequence variation are introduced at the bolded/underlined residues. The plant THH repeat-containing scaffold polypeptide sequences can contain substitutions of up to 3 amino acids or a deletion in the place of the amino acids corresponding to residues 12-13, 33, 35-36, 38, 46-47, 66, 68-69, 71, 79-80, 99, 101-102, 104, and 112-113 (residues in bold and underlined) of SEQ ID NOs:127-129.

SEQ ID NO:127

GDDLGKKLHLAASRGHLEIVRVLVEAGADVNALDKFGRTALHIAASRGHL
EVVKLLLEAGADVNALDKFGRTALHLAASRGHLEVVKLLLEAGADVNALD
KFGDTALHVSIDNGNEDIAEILQ

SEQ ID NO:128

GDDLGKKLHLAASRGHLEIVRVLVEAGADVNALDKFGRTPLHIAASKGNE
QVVKLLLEAGADPNALDKFGRTPLHIAASKGNEQVVKLLLEAGADPNAQD
KFGDTALHVSIDNGNEDIAEILQ

SEQ ID NO:129

GSDLGKKLLEAARAGQDDEVRILMANGADVNALDKFGRTPLHIAASKGNE
QVVKLLLEAGADPNALDKFGRTPLHIAASKGNEQVVKLLLEAGADPNAQD
KFGKTAFDISIDNGNEDLAEILQ

[0069] The sequence of the scaffold polypeptide sequences can be at least 70% (i.e., 80, 85, 90, 95, 98, or 100%) identical to the sequence outside of the foregoing amino acid positions (in bold) of SEQ ID NOS: 127-129. Alternatively, the sequence of the scaffold polypeptide sequences outside of the foregoing amino acid positions (in bold) of SEQ ID NOS: 127-129 can contain up to 30 (i.e., 28, 26, 24, 22, 20, 18, 17, 16, 15, 14, 13, 12, 11, 10, 9, 8, 7, 6, 5, 4, 3, 2, or 1) single amino acid substitutions, deletions, insertions or additions. In some cases it can be desirable to include additional repeating units. SEQ ID NOs: 127-129 have an amino-terminal cap, two internal repeats and a carboxy-terminal cap. It might be desirable to have 1-6 internal repeats. The amino-terminal cap sequence is aa 1-33. The first internal repeat is 34-66 and the second internal repeat is 67- 99. The carboxy-terminal cap sequence is aa 100-123. The first or the second internal repeats or both can be independently repeated 1, 2, 3, 4, 5 or 6 times.

[0070] The putative binding sites are formed by amino acid side chains protruding from the rigid secondary structure formed by the scaffold polypeptide sequence. These proteins may typically form a larger, flatter binding surface and are particularly useful for binding to targets that do not have deep clefts or pockets.

[0071] Another suitable scaffold can be based on oryzacystatin (J Biol Chem 262:16793 (1987); Biochemistry 39:14753 (2000)), a member of the cystatin/Papain Family (Pfam Identifier PF0003 1) that is identified as a cysteine proteinase inhibitor of rice. The sequence of oryzacystatin is depicted below. A scaffold having the amino acid sequence C1-X1-C2-X2-C3-X3-C4 where each of X1, X2, X3 and X4 is a variable region and C1, C2, C3 and C4 are the backbone regions can be created based on oryzacystatin.

MSSVGGPVLGGVEPVGNENDLHLVDLARFAVTEHNKKANSLLEFEKLVSV
KQQVVAGTLYYFTLEVKEGDAKKLYEAKVWEKPWMDFKELQEFKPVDASA
NA
C1-MSS
(aa 1-3)
X1-VGGP
(aa 4-7)
C2-VLGGVEPVGNENDLHLVDLARFAVTEHNKKANSLLEFEKLVSV
(aa-8-50)
X2-KQQVVAGT
(aa 51-58)
C3-LYYFTLEVKEGDAKKLYEAKVWE
(aa 59-81)
X3-KPWM
(aa 82-85)
C4-DFKELQEFKPVDASANA
(aa 86-102)

[0072] FIG. 2 depicts the sequences of a large number of plant proteins aligned with oryzacystatin. Examples of suitable C1-C4 regions are indicated. FIG. 4 depicts the sequences of a small number of plant proteins aligned with oryzacystatin. Examples of suitable C1-C4 regions are indicated. In general, X1 can be a sequence of 2-20 random amino acids (e.g., 3 amino acids). X2 can be a sequence of 2-20 random amino acids (e.g., 4 amino acids). X3 can be a sequence of 2-20 random amino acids (e.g., 4 amino acids).

[0073] Yet another suitable can be based on the C2 protein of rice (Biochemistry 42:11625 (2003)), a member of the C2 domain family (Pfam Identifier PF00168) that is thought to be be involved in plant defense signaling systems. The sequence of rice C2 is depicted below. A scaffold having the amino acid sequence C1-X1-C2-X2-C3-X3-C4 where each of X1, X2, X3 and X4 is a variable region and C1, C2, C3 and C4 are the backbone regions can be created based on rice C2.

MAGSGVLEVHLVDAKGLTGNDFLGKIDPYVVVQYRSQERKSSVARDQGKN
PSWNEVFKFQINSTAATGQHKLFLRLMDHDTFSRDDFLGEATINVTDLIS
LGMEHGTWEMSESKHRVVLADKTYHGEIRVSLTFTASAKAQDHAEQVGGW
AHSFRQ
C1-MAGSGVLEVHLVDAKG
(aa 1-16)
X1-LTGNDFLGKID
(aa 17-27)
C2-PYVVVQYRSQERK
(aa 28-40)
X2-SSVARDQGKNP
(aa 41-51)
C3 -SWNEVFKFQINSTAATGQHKLFLRL
(aa 52-76)
X3-MDHDTFSRDDFL
(aa 77-88)
C4-GEATINVTDLISLGMEHGTWEMSESKHRVVLADKTYHGEIRVSLTFT
ASAKAQDHAEQVGGWAHSFRQ
(aa 89-156)

[0074] FIG. 3 depicts the sequences of a large number of plant proteins aligned with rice C2. Examples of suitable C1-C4 regions are indicated. FIG. 5 depicts the sequences of a small number of plant proteins aligned with oryzacystatin. Examples of suitable C1-C4 regions are indicated. In general, X1 can be a sequence of 2-20 random amino acids (e.g., 11 amino acids). X2 can be a sequence of 2-20 random amino acids (e.g., 11 amino acids). X3 can be a sequence of 2-20 random amino acids (e.g., 12 amino acids).

[0075] The following sections disclose methods for generating libraries of nucleic acids encoding chimeric binding proteins based on plant scaffold polypeptide sequences.

II. Generation of Nucleic Acid Libraries Based on a Plant Scaffold polypeptide Sequence

[0076] A large library of nucleic acid sequence variants encoding the plant scaffold polypeptide sequence is created based on one or more plant scaffold polypeptide sequences. The library of nucleic acids encodes at least 5 (e.g., 1,000, 10⁵, 10⁶, 10⁷, 10⁹, 10¹², 10¹⁵ or more) different chimeric binding protein sequences. It is recognized that not every member of a library generated by the methods described herein will encode a unique amino acid sequence. Nevertheless, it is desirable that at least 10% (e.g., 25%, 30%, 40%, 50%, 60%, 70%, 75%, or 90%) of the encoded chimeric binding proteins represented in the library be unique.

[0077] Prior to diversifying a plant scaffold polypeptide sequence, it may be useful to estimate computationally the expected sequence diversity to be generated with a given set of sequence variation parameters. A method for estimating sequence diversity is described, e.g., in Volles et al. (2005), 33(11): 3667-3677. For example, the number of different sequences expected in a library of nucleic acids generated by PCR can be estimated based on the mutation frequency of the mutagenic polymerase used for the amplification. Useful algorithms for estimating sequence diversity in randomized protein-encoding libraries can also be found on the world wide web, e.g., at guinevere.otago.ac.nz/mlrgd/STATS/index.

[0078] Libraries of nucleic acids encoding plant chimeric binding proteins can be generated by a number of known methodologies. Sequence diversity is introduced into a plant scaffold polypeptide sequence by substitution, deletion, insertion, or addition of amino acids at the highly variable positions of a scaffold polypeptide sequence as described above. Since the set of 20 amino acids that are genetically encoded in plants have somewhat redundant chemical and structural properties, a subset of amino acids (e.g., a subset of 4 types of amino acids) that encompasses this structural diversity can be adopted for substitutions. For example, amino acids to be used for substitution or insertion can be selected to include an acidic amino acid, a neutral amino acid, an aliphatic amino acid, and an aromatic amino acid (see Table 3). For example, the amino acids used for substitution could be limited to aspartate, serine, alanine, and tyrosine. Limiting the redundancy of amino acid substitutions will increase the overall structural and binding diversity of the library of chimeric binding proteins.

TABLE 3
Chemical Properties of Amino Acids
Genetically Encoded in Plants

| Acidic | Neutral | Aliphatic | Aromatic | Basic |
|---|---|---|---|---|
| Aspartate, | Asparagine, | Alanine, | Histidine, | Arginine, |
| Glutamate, | Cysteine | Glycine, | Phenylalanine, | Lysine |
| | Glutamine, | Isoleucine, | Tryptophan, | |
| | Methionine, | Leucine, | Tyrosine | |
| | Proline, Serine, | Valine | | |
| | Threonine, | | | |

[0079] The library of nucleic acids can be generated in vitro by assembly of sets of oligonucleotides with overlapping complementary sequences. First, a scaffold polypeptide sequence sequence is selected that is to be encoded by sets of assembled oligonucleotides. The sequences to be encoded in the variable regions of a given scaffold polypeptide sequence will include a multitude of heterogeneous sequences containing substitutions, insertions, deletions in additions in accordance with the library of chimeric binding polypeptides to be generated as described above. The scaffold polypeptide sequences to be encoded can include the C₁-C₄ subequences corresponding to any of SEQ ID NOs: 1-30, 31-60, 61-90, and 91-120, respectively.

[0080] One set of oligonucleotides encodes regions of the plant scaffold polypeptide sequence where diversity is to be introduced (e.g., at X₁, X₂, and X₃). In contrast, regions of the scaffold polypeptide sequence in which little or no variation is to be introduced (e.g., in backbone domains of PAP scaffold polypeptide sequences) are encoded by a set of oligonucleotides encoding amino acid sequences with no less than 70% (i.e., 75%, 80%, 85%, 90%, 95%, or 100%) identity to any one of the above-mentioned scaffold polypeptide sequences. The details of this method are described, e.g., in U.S. Pat. No. 6,521,453, hereby incorporated by reference.

[0081] Sequence-varied oligonucleotides used to generate libraries of nucleic acids are typically synthesized chemically according to the solid phase phosphoramidite triester method described by Beaucage and Caruthers (1981), Tetrahedron Letts., 22(20):1859-1862, e.g., using an 20 automated synthesizer, as described in Needham-VanDevanter et al. (1984) Nucleic Acids Res., 12:6159-6168. A wide variety of equipment is commercially available for automated oligonucleotide synthesis. Multi-nucleotide synthesis approaches (e.g., tri-nucleotide synthesis), as discussed, supra, are also useful.

[0082] Nucleic acids can be custom ordered from a variety of commercial sources, such as Sigma-Genosys (at sigma-genosys.com/oligo.asp); The Midland Certified Reagent Company (mcrc@oligos.com), The Great American Gene Company (at genco.com), ExpressGen Inc. (at expressgen.com), Operon Technologies Inc. (Alameda, Calif.) and many others.

[0083] The oligonucleotides can have a codon use optimized for expression in a particular cell type (e.g., in a plant cell, a mammalian cell, a yeast cell, or a bacterial cell). Codon usage frequency tables are publicly available, e.g., on the world wide web at kazusa.orjp/codon. Codon biasing can be used to optimize expression in a cell or on the surface of a cell in which binding of a plant chimeric binding protein is to be assessed, and can also be used to optimize expression of the chimeric binding protein in a transgenic organism of commercial interest (e.g., a transgenic plant). In general, codons with a usage frequency of less than 10% are not used. Before synthesis oligonucleotide sequences are checked for potentially problematic sequences, e.g, restriction sites useful for subdloning, potential plant splice acceptor or donor sites (see, e.g., cbs.dtu.dk/services/FeatureExtract/), potential mRNA destabilization sequences (e.g., “ATTTA”), and stretches of more than four occurrences of the same nucleotide. Potentially problematic sequences are changed accordingly.

[0084] Populations of oligonucleotides are synthesized that encode amino acid variations in the putative binding regions of the selected scaffold polypeptide sequence (e.g., in regions X₁, X₂, and X₃ of a PAP scaffold polypeptide sequence).

[0085] Preferably, all of the oligonucleotides of a selected length (e.g., about 10, 12, 15, 20, 30, 40, 50, 60, 70, 80, 90, or 100 or more nucleotides) that correspond to regions where sequence diversity is to be introduced in the scaffold polypeptide sequence encode all possible amino acid variations from a diverse set of amino acids as described above. This includes N oligonucleotides per N sequence variations, where N is the number of different sequences at a locus. The N oligonucleotides are identical in sequence, except for the nucleotide(s) encoding the variant amino acid(s). In generating the sequence-varied oligonucleotides, it can be advantageous to utilize parallel or pooled synthesis strategies in which a single synthesis reaction or set of reagents is used to make common portions of each oligonucleotide. This can be performed e.g., by well-known solid-phase nucleic acid synthesis techniques, or, e.g., utilizing array-based oligonucleotide synthetic methods (see e.g., Fodor et al. (1991) Science, 251: 767-777; Fodor (1997) “Genes, Chips and the Human Genome” FASEB Journal. 11:121-121; Fodor (1997) “Massively Parallel Genomics” Science. 277:393-395; and Chee et al. (1996) “Accessing Genetic Information with High-Density DNA Arrays” Science 274:610-614).

[0086] In typical synthesis strategies the oligonucleotides have at least about 10 bases of sequence identity to either side of a region of variance to ensure reasonably efficient recombination. However, flanking regions with identical bases can have fewer identical bases (e.g., 4, 5, 6, 7, 8, or 9) and can, of course, have larger regions of identity (e.g., 11, 12, 13, 14, 15, 16, 17, 18, 19, 20, 25, 30, 50, or more).

[0087] The oligonucleotides to be assembled together are incubated to allow hybridization between oligonucleotides containing overlapping complementary sequences. Each set of hybridizing overlapping oligonucleotides thereby forms a contiguous nucleic acid interrupted by small gaps. These small gaps can be filled to form full length sequences using any of a variety of polymerase-mediated reassembly methods, e.g., as described herein and as known to one of skill. The greatest sequence diversity is introduced in oligonucleotides encoding the plant scaffold polypeptide sequence putative binding regions and residues. However, oligonucleotides encoding specific sequence variations can be “spiked” in the recombination mixture at any selected concentration, thus causing preferential incorporation of desirable modifications into the encoded plant chimeric binding proteins in regions outside of the putative binding domains.

[0088] For example, during oligonucleotide elongation, hybridized oligonucleotides are incubated in the presence of a nucleic acid polymerase, e.g., Taq, Klenow, or the like, and dNTP's (i.e., dATP, dCTP, dGTP and dTTP). If regions of sequence identity are large, Taq or other high-temperature polymerase can be used with a hybridization temperature of between about room temperature (i.e., about 25° C.) and, e.g., about 65° C. If the areas of identity are small, Klenow, Taq or polymerases can be used with a hybridization temperature of below room temperature. The polymerase can be added to the assembly reaction prior to, simultaneously with, or after hybridization of the oligonucleotides. Afterwards, the resulting elongated double-stranded nucleic acid sequences are denatured, hybridized, and elongated again. This cycle can be repeated for any desired number of times. The cycle is repeated e.g., from about 2 to about 100 times.

[0089] Optionally, after multiple cycles of combinatorial nucleic acid assembly, the resulting products can be amplified, e.g., by standard polymerase chain reaction (PCR). A portion of the volume of the above-described assembly reaction is incubated with unique forward and reverse primers that hybridize universally to the ends of the nucleic acids, as well as dNTPs and a suitable polymerase (e.g., pfu polymerase). The PCR reaction is then carried out for about 10 to 40 cycles.

[0090] To determine the extent of oligonucleotide incorporation any approach which distinguishes similar nucleic acids can be used. For example, the nucleic acids can be cloned and sequenced, or amplified (in vitro or by cloning, e.g., into a standard cloning or expression vector) and cleaved with a restriction enzyme which specifically recognizes a particular oligonucleotide sequence variant.

[0091] It is useful to include rare restriction sites (e.g., Not I) in the 5′ ends of the 5′ and 3′ most primers used either in the assembly or PCR reactions. Inclusion of restriction sites in these primers facilitates subdloning of the nucleic acids into a vector by restriction digestion and subsequent ligation. Alternatively, the assembly reaction or PCR products can also be subcloned, without being restriction digested, using standard methods, e.g., “TA” cloning.

[0092] Other methods for introducing diversity into a plant scaffold polypeptide sequence can also be used. For example, a scaffold polypeptide sequence can be encoded in a nucleic acid template, e.g., a plasmid contruct. Alternatively, a PCR product, mRNA or genomic DNA from an appropriate plant species such as soybean may also serve as a template encoding a plant scaffold polypeptide sequence. One or more scaffold polypeptide sequence subsequences to be diversified (e.g., the X₂ region of a PAP scaffold polypeptide sequence) can be diversified during or after amplification from the scaffold polypeptide sequence nucleic acid template by any of a number of error-prone PCR methods. Error-prone PCR methods can be divided into (a) methods that reduce the fidelity of the polymerase by unbalancing nucleotides concentrations and/or adding of chemical compounds such as manganese chloride (see, e.g., Lin-Goerke et al. (1997) Biotechniques, 23, 409-412), (b) methods that employ nucleotide analogs (see, e.g., U.S. Pat. No. 6,153,745), (c) methods that utilize ‘mutagenic’ polymerases (see, e.g., Cline, J. and Hogrefe, H. H. (2000) Strategies (Stratagene Newsletter), 13, 157-161 and (d) combined methods (see, e.g., Xu, H., Petersen, E. I., Petersen, S. B. and el-Gewely, M. R. (1999) Biotechniques, 27, 1102-1108. Other PCR-based mutagenesis methods include those, e.g., described by Osuna J, Yanez J, Soberon X, and Gaytan P. (2004), Nucleic Acids Res. 2004, 32(17):el36 and Wong T S, Tee K L, Hauer B, and Schwaneberg, Nucleic Acids Res. 2004 Feb. 10; 32(3):e26), and others known in the art.

[0093] After generating a population of sequence variants, these can be substituted into the appropriate region of a chosen plant scaffold polypeptide sequence nucleic acid (e.g., a plasmid containing a scaffold polypeptide sequence) by subcloning which thereby effectively acts as a vector for the library of diversified sequences.

[0094] Yet another approach to mutagenizing specific plant scaffold polypeptide sequence regions is the use of a mutagenic E. coli strain (see, e.g., Wu et al. (1999), Plant Mol. Biol., 39(2):381-386). A nucleic acid vector containing a target sequence to be mutated is introduced into the mutator strain, which is then propagated. Error-prone DNA replication in the mutator E. coli strain introduces mutations into the introduced target sequence. The population of altered target sequences is then recovered and subcloned into the appropriate position of a nucleic acid encoding the selected plant scaffold polypeptide sequence to generate a diverse library of nucleic acids encoding plant chimeric binding proteins.

III. Expression and Screening of Plant Chimeric Binding Proteins

[0095] The library of nucleic acids based on a plant scaffold polypeptide sequence and encoding plant chimeric binding polypeptides are subcloned into an expression vector and introduced into a biological replication system to generate an expression library. The expression library can be propagated and screened to identify plant chimeric binding proteins that bind a target molecule (TM) of interest (e.g., a nematode, insect, fungal, viral or plant protein).

[0096] The biological replication system on which screening of plant chimeric binding proteins will be practiced should be capable of growth in a suitable environment, after selection for binding to a target. Alternatively, the nucleic acid encoding the selected plant chimeric binding protein can be isolated by in vitro amplification. During at least part of the growth of the biological replication system, the increase in number is preferably approximately exponential with respect to time. The frequency of library members that exhibits the desired binding properties may be quite low, for example, one in 10⁶ or less.

[0097] Biological replication systems can be bacterial DNA viruses, vegetative bacterial cells, bacterial spores. Eukaryotic cells (e.g., yeast cells) can also be used as a biological replication system.

[0098] In a particularly useful embodiment, a chimeric binding protein-phage coat protein fusion is encoded in a phagemid construct. The phagemid constructs are transformed into host bacteria, which are subsequently infected with a helper phage that expresses wild type coat proteins. The resulting phage progeny have protein coats that include both fusion protein and wild-type coat proteins. This approach has the advantage that phage viability is greater compared to viability of phage that have exclusively chimeric binding protein-coat fusion proteins. Phagemid-based display library construction and screening kits are commercially available, e.g., the EZnet™ Phage Display cDNA Library Construction Kit and Screening Kit (Maxim Biotech, Inc., San Francisco, Calif.).

[0099] Nonetheless, a strain of any living cell or virus is potentially useful if the strain can be: 1) genetically altered with reasonable facility to encode a plant chimeric binding protein, 2) maintained and amplified in culture, 3) manipulated to display the potential binding protein domain where it can interact with the target material, and 4) selected while retaining the genetic information encoding the expressed plant chimeric binding protein in recoverable form. Preferably, the biological replication system remains viable after affinity-based selection.

[0100] When the biological replication system is a bacterial cell or a phage which is assembled in the periplasm, the expression vector for display of the plant chimeric binding protein encodes the chimeric binding protein itself fused to two additional components. The first component is a secretion signal which directs the initial expression product to the inner membrane of the cell (a host cell when the package is a phage). This secretion signal is cleaved off by a signal peptidase to yield a processed, mature, plant chimeric binding protein. The second component is an outer surface transport signal which directs the biological replication system to assemble the processed protein into its outer surface. This outer surface transport signal can be derived from a surface protein native to the biological replication system (e.g., the M13 phage coat protein gIII).

[0101] For example, the expression vector comprises a DNA encoding a plant chimeric binding protein operably linked to a signal sequence (e.g., the signal sequences of the bacterial phoA or bla genes or the signal sequence of M13 phage qene III) and to DNA encoding a coat protein (e.g., the M13 gene III or gene VIII proteins) of a filamentous phage (e.g., M13). The expression product is transported to the inner membrane (lipid bilayer) of the host cell, whereupon the signal peptide is cleaved off to leave a processed hybrid protein. The C-terminus of the coat protein-like component of this hybrid protein is trapped in the lipid bilayer, so that the hybrid protein does not escape into the periplasmic space. As the single-stranded DNA of the nascent phage particle passes into the periplasmic space, it collects both wild-type coat protein and the hybrid protein from the lipid bilayer. The hybrid protein is thus packaged into the surface sheath of the filamentous phage, leaving the plant chimeric binding protein exposed on its outer surface. Thus, the filamentous phage, not the host bacterial cell, is the biological replication system in this embodiment. If a secretion signal is necessary for the display of the plant chimeric binding protein, a “secretion-permissive” bacterial strain can be used for growth of the filamentous phage biological replication system.

[0102] It is unnecessary to use an inner membrane secretion signal when the biological replication system is a bacterial spore, or a phage whose coat is assembled intracellularly. In these cases, the display means is merely the outer surface transport signal, typically a derivative of a spore or phage coat protein.

[0103] Filamentous phage in general are attractive as biological replication systems for display of plant chimeric binding proteins, and M13 in particular, is especially attractive because: 1) the 3D structure of the virion is known; 2) the processing of the coat protein is well understood; 3) the genome is expandable; 4) the genome is small; 5) the sequence of the genome is known; 6) the virion is physically resistant to shear, heat, cold, urea, guanidinium Cl, low pH, and high salt; 7) the phage is a sequencing vector so that sequencing is especially easy; 8) antibiotic-resistance genes have been cloned into the genome; 9) It is easily cultured and stored, with no unusual or expensive media requirements for the infected cells, 10) it has a high burst size, each infected cell yielding 100 to 1000 M13 progeny after infection; and 11) it is easily harvested and concentrated by standard methods.

[0104] For example, when the biological replication system is M13 the gene III or the gene VIII proteins can be used as an outer surface targeting signal. Alternatively, the proteins from genes VI, VII, and IX may also be used.

[0105] The encoded plant chimeric binding protein can be fused to the surface targeting signal (e.g., the M13 gene III coat protein) at its carboxy or amino terminal. The fusion boundary between the plant chimeric binding protein and the targeting signal can also include a short linker sequence (e.g., up to 20 amino acids long) to avoid undesirable interactions between the chimeric binding protein and the fused targeting signal. In some embodiments it is advantageous to include within the linker sequence a specific proteolytic cleavage site. In addition, the amino terminal or carboxy terminal of the fused protein can include a short epitope tag (e.g., a hemaglutinin tag). Inclusion of a proteolytic cleavage site or a short epitope tag is particularly useful for purification of a library of chimeric binding proteins from a population of cells expressing the library. Epitope-tagged chimeric binding proteins can be conveniently purified by proteolytic cleavage of linker sequence followed by affinity chromatography utilizing an antibody or other binding agent that recognizes the epitope tag.

[0106] Many methods exist for screening phage display libraries (see, e.g., Willats (2002), Plant Mol. Biol., 50:837-854). As commonly practiced, the target molecule of interest is adsorbed to a support and then exposed to solutions of phage displaying plant chimeric binding proteins. The target molecule can be immobilized by passive adsorption on a support medium, e.g, tubes, plates, columns, or magnetic beads. Generally, the adsorptive support medium is pre-blocked, e.g., with bovine serum albumin, milk, or gelatin, to reduce non-specific binding of the phage during screening. Alternatively, the target molecule can be biotinylated, so interaction between chimeric binding protein-bearing phage and the target molecule can be carried out in solution. Phage that bind to the target can then be selected using avidin or streptavidin bound to a solid substrate (e.g., beads or a column).

[0107] After phage are allowed to interact with the target molecule, non-interacting phage are removed by washing. The remaining, specifically binding phage are then eluted by one of any number of treatments including, e.g., lowering or increasing pH, application of reducing agents, or use of detergents. In one embodiment, a specific proteolytic cleavage site is introduced between the plant chimeric binding protein sequence and the phage coat protein sequence. Thus, phage elution can be accomplished simply by addition of the appropriate protease.

[0108] Eluted phage are then amplified by infection of host cells and can subsequently be re-screened by the method just outlined to reduce the number of false positive binders. During each round of phage screening, care should be taken to include growth of the phage on a solid medium rather than exclusively in a liquid medium as this minimizes loss of phage clones that grow sub-optimally.

[0109] Plant chimeric binding proteins can also be expressed and screened for binding solely in vitro using ribosomal display. An exclusively in vitro approach circumvents the requirement to introduce the library of nucleic acids encoding plant chimeric binding proteins into a biological replication system. Methods for screening polypeptides in vitro by ribosomal protein display are described in detail, e.g., in U.S. Pat. No. 6,589,741. The nucleic acids described in the section above are modified by adding a phage promoter sequence (e.g., a T7 promoter) enabling in vitro transcription, a ribosome binding sequence upstream to the start of translation of the encoded plant chimeric binding protein, and a transcription termination sequence (e.g., from phage T3). The modified library of nucleic acids is then transcribed in vitro to generate a corresponding mRNA population encoding plant chimeric binding proteins. Plant chimeric binding proteins are then expressed in vitro by translating the population of mRNA molecules devoid of stop codons in the correct reading frame in an in vitro translation system, under conditions that allow the formation of polysomes. The polysomes so formed are then brought into contact with a target molecule under conditions that allow the interaction of plant chimeric binding proteins with the target molecule. Polysomes displaying chimeric binding proteins that interact with the target molecule are then separated from non-interacting polysomes displaying no such (poly)peptides; and the mRNA associated with the interacting polysome is then amplified (e.g., by PCR) and sequenced.

[0110] Interaction of a plant chimeric binding protein with a target protein can also be detected in a genetic screen. In the screen, the target protein functions as a “bait protein” and each plant chimeric binding protein functions as a potential “prey” protein in a binding assay that utilizes a two-hybrid assay or three-hybrid assay (see, e.g., U.S. Pat. No. 5,283,317; Zervos et al. (1993) Cell 72:223-232; Madura et al. (1993) J. Biol. Chem. 268:12046-12054; Bartel et al. (1993) Biotechniques 14:920-924; Iwabuchi et al. (1993) Oncogene 8:1693-1696; Hubsman et al. (2001) Nuc. Acids Res. Feb 15;29(4):E18; and Brent W094/10300).

[0111] A two-hybrid assay can be carried out using a target polypeptide as the bait protein. In sum, the target polypeptide is fused to the LexA DNA binding domain and used as bait. The prey is plant chimeric binding protein library cloned into the active site loop of TrxA as a fusion protein with an N-terminal nuclear localization signal, a LexA activation domain, and an epitope tag (Colas et al. 1996 Nature 380:548; and Gyuris et al. Cell 1993 75:791). Yeast cells are transformed with bait and prey genes. When the target fusion protein binds to a plant chimeric binding protein fusion protein, the LexA activation domain is brought into proximity with the LexA DNA binding domain and expression of reporter genes or selectable marker genes having an appropriately positioned LexA binding site increases. Suitable reporter genes include fluorescent proteins (e.g., EGFP), enzymes (e.g., luciferase, β-galactosidase, alkaline phosphatase, etc.) Suitable selectable marker genes include, for example, the yeast LEU2 gene.

[0112] After identification of one or more target-binding chimeric binding proteins, the isolated nucleic acids encoding the chimeric binding proteins can be mutagenized by the methods described herein, to generate small expression libraries expressing variant chimeric binding proteins. The chimeric binding protein-variant expression libraries can be screened to identify chimeric binding protein variants with improved target binding properties (e.g., increased affinity or specificity).

[0113] The following specific examples are to be construed as merely illustrative, and not limitative of the remainder of the disclosure in any way whatsoever. Without further elaboration, it is believed that one skilled in the art can, based on the description herein, utilize the present invention to its fullest extent. All publications cited herein are hereby incorporated by reference in their entirety.

### EXAMPLES

### Example 1

### Design and Expression of Plant Scaffold Polypeptide Sequences

[0114] Several protein domain families were analyzed for their potential use as scaffolds. A search of PFAM domains (pfam.wustl.edu; see Bateman et al. (2004)), restricting the output to Viridiplantae, was conducted to limit domains only to those present in green plants. Four protein domain families were selected to develop plant universal molecular recognition libraries; the accessory domain of purple acid phosphatase (PAP), plant cystatins, plant C2 domains and the turn-helix-helix (THH) motif found in ankyrin repeat proteins.

[0115] Three purple acid phosphatase scaffolds were designed having the sequence of SEQ ID NOs:34-36. The amino acid sequence of the accessory domain from kidney bean PAP was used as a query sequence to BLAST the NCBI database. When the output was restricted to proteins found in Viridiplantae, 62 unique sequences were identified. From an alignment of these sequences, a consensus plant PAP sequence was generated (SEQ ID NO:34) by selecting the most frequent amino acid at each position in the alignment. The kidney bean (Phaseolus vulgaris) PAP was selected as a parental scaffold (SEQ ID NO:35), because of its known structure. A PAP from soybean, Glycine max, was also chosen (SEQ ID NO:36), as this species represents a common crop species in which transgenic products are generated.

[0116] A set of scaffold polypeptide sequences which contain plant ankyrin-like repeats was also designed. Ankyrin-like repeats are small turn-helix-helix (THH) motifs consisting of approximately 33 amino acids. They are common elements of proteins from all organisms and are often found in tandem arrays of 2 to 20 repeats within a protein.

[0117] Three THH scaffolds were generated. These proteins are similar in structure to GA binding protein (GABP-β). This protein consists of THH like amino and carboxy terminal caps with 3 THH internal repeats. In this protein, it is thought that the caps help stabilize the protein by shielding hydrophobic residues found in the internal repeats.

[0118] Three hundred and twelve Viridiplantae ankyrin repeats proteins found in PFAM were aligned to aid in designing plant-specific THH scaffolds. A plant consensus THH sequence was generated by selecting the most frequently occurring amino acid at each position. This sequence was termed the plant consensus internal repeat sequence. This sequence was used to search the NCBI databases by BLAST alignment to find the closest natural THH sequence found in plants. A sequence from wheat (Triticum aestivum) was found. The designed repeat based on T. aestivum contains a substitution of valine for the single cysteine occurring in the T. aestivum sequence. Two sets of N and C terminal caps were generated. One set consists of sequences derived from GABP-β and the second set was derived from the plant THH consensus sequence and optimized to resemble the structure of GABP-β. In particular, the N terminal cap has an extended alpha-helical structure, while the C terminal cap has a truncated helix compared to the typical THH repeat.

[0119] Three THH scaffolds were designed, one consists of plant consensus N and C caps and two plant consensus internal THH repeats (SEQ ID NO:37). Another consists of plant consensus N and C caps and two wheat internal repeats (SEQ ID NO:38) and the third consists of ankyrin like N and C caps with two wheat internal repeats (SEQ ID NO:39).

[0120] The genes encoding the plant scaffold polypeptide sequences were designed for expression testing in plants, bacteria, and on the surface of phage. Codons were selected for plant expression using a publicly available Glycine max codon usage table (at kazusa.or.jp/codon, codon usage tabulated from the international DNA sequence databases: status for the year 2000. Nakamura, Y, Gojobori, T and Ikemura, T (2000) Nucl. Acids Res. 28:292.). Codon selection was done manually with the aim for the final codon frequency to roughly reflect the natural frequency for Glycine max. Rarely used codons (<10% frequency) were not used. Final sequences were checked for potential problematic sequences, including removal of restriction sites needed for cloning, potential plant splice acceptor or donor sites (see website at cbs.dtu.dk/services/NetPgene/), potential mRNA destabilization sequences (ATTTA) and stretches of more than 4 occurrences of the same nucleotide. Any potential problematic sequences were altered in the genes by modifying codon usage. Since the THH sequences have 4 similar repeat sequences within each protein, steps were taken to reduce nucleotide similarity within repeats; the average repeat identity was reduced 10-15% by these means.

[0121] Seven constructs were produced using synthetic gene assembly, (three based on THH scaffold polypeptide sequences, two based on PAP scaffold polypeptide sequences, one plant cystatin and one plant C2 domain protein). The three THH scaffold polypeptide sequences were placed into a phagemid vector as fusion sequences with the gene III coat protein (gIII) at its carboxy terminus (Phage 3.2, Maxim Biotech, Inc., South San Francisco, Calif.). A 6-His tag was included at the 5′ end of the gene as well as a c-Myc tag between the scaffold gene and the encoded amino terminus of gIII. The phagemid constructs were then packaged into phage particles and the phage were tested for expression and surface display of the THH scaffold. A phage ELISA using either anti-His and anti-Myc indicated that the THH scaffold proteins were expressed on the surface of phage in phage ELISAs, suggesting that all 3 THH scaffold polypeptide sequence constructs are folding and expressing well on the phage surface. The selected scaffold polypeptide sequences were then used to generate expression vectors to evaluate their expression in transgenic plants by immunoblotting.

[0122] Tobacco leaves were injected with agrobacterium, LB4404 transformed with THH containing plant expression vectors. Two days later, sections of leaves injected with agrobacterium were harvested, frozen on dry ice, then ground into a fine powder with a pestle. PBS containing 0.2% Tween-20 was added to the fine powder at a 1:1 weight to volume ratio and additional grinding was done. Insoluble material was removed by centrifugation and 10 ul of the remaining supernatant was loaded onto a 4-12% acrylamide SDS page gel (NuPage, Intvitrogen). Proteins were transferred to PVDF membranes. Proteins were detected using a rat anti-HA antibody (Roche) and an anti-rat HRP conjugated secondary antibody (Chemicon). HRP was detected using Amerham Lumigen reagents.

[0123] All three THH scaffold were found to be expressed, with the relative level of expression of the three scaffolds being TA-THH>CC-THH>. TC-THH.

### OTHER EMBODIMENTS

[0124] All of the features disclosed in this specification may be combined in any combination. Each feature disclosed in this specification may be replaced by an alternative feature serving the same, equivalent, or similar purpose. Thus, unless expressly stated otherwise, each feature disclosed is only an example of a generic series of equivalent or similar features. From the above description, one skilled in the art can easily ascertain the essential characteristics of the present invention, and without departing from the spirit and scope thereof, can make various changes and modifications of the invention to adapt it to various usages and conditions. Thus, other embodiments are also within the scope of the following claims.

1. A library of nucleic acids encoding at least ten different polypeptides, the amino acid sequence of each polypeptide comprising:
C1-X1-C2-X2-C3-X3-C4, wherein
(i) subsequence C1 is selected from SEQ. ID Nos:1-30, subsequence C2 is selected from SEQ ID Nos:31-60, subsequence C3 is selected from SEQ. ID NOs:61-90; subsequence C4 is selected from SEQ. ID NOs:91-120, and each of C1-C4 comprise up to 10 single amino acid substitutions, deletions, insertions, or additions to the selected subsequence;
(ii) C1-C4 are homogeneous across a plurality of the encoded polypeptides
(iii) each of X1-X3 is an independently variable subsequence consisting of 2-20 amino acids; and
(iv) each of X1-X3 are heterogeneous across a plurality of the encoded polypeptides.

2. A library of nucleic acids encoding at least ten different polypeptides the amino acid sequence of each polypeptide comprising:
C1-X1-C2-X2-C3-X3-C4, wherein
(i) subsequence C1 is selected from FIG. 2 or FIG. 4, subsequence C2 is selected from FIG. 2 or FIG. 4, subsequence C3 is selected from FIG. 2 or FIG. 4; subsequence C4 is selected from FIG. 2 or FIG. 4, and each of C1-C4 comprise up to 10 single amino acid substitutions, deletions, insertions, or additions to the selected subsequence;
(ii) C1-C4 are homogeneous across a plurality of the encoded polypeptides
(iii) each of X1-X3 is an independently variable subsequence consisting of 2-20 amino acids; and
(v) each of X1-X3 are heterogeneous across a plurality of the encoded polypeptides.

3. Alibrary of nucleic acids encoding at least ten different polypeptides, the amino acid sequence of each polypeptide comprising:
C1-X1-C2-X2-C3-X3-C4, wherein
(i) subsequence C1 is selected from FIG. 3 or FIG. 5, subsequence C2 is selected from FIG. 3 or FIG. 5, subsequence C3 is selected from FIG. 3 or FIG. 5; subsequence C4 is selected from FIG. 3 XX, and each of C1-C4 comprise up to 30 single amino acid substitutions, deletions, insertions, or additions to the selected subsequence;
(ii) C1-C4 are homogeneous across a plurality of the encoded polypeptides
(iii) each of X1-X3 is an independently variable subsequence consisting of 2-20 amino acids; and
(vi) each of X1-X3 are heterogeneous across a plurality of the encoded polypeptides.

4-26. (canceled)

27. A method of generating the library of claim 1, comprising:
(i) providing a parental nucleic acid encoding a parental polypeptide comprising the amino acid sequence: C1-X1-C2-X2-C3-X3-C4, wherein subsequence C1 is selected from SEQ ID NOs:1-30, subsequence C2 is selected from SEQ ID NOs:31-60, subsequence C3 is selected from SEQ ID NOs:61-90; subsequence C4 is selected from SEQ ID Nos:91 120; each of C1-C4 comprises up to 10 single amino acid substitutions, deletions, insertions, or additions to the selected subsequence; and each of X1-X3 is an independent subsequence consisting of 2-20 amino acids;
(ii) replicating the parental nucleic acid under conditions that introduce up to 10 single amino acid substitutions, deletions, insertions, or additions to the X1, X2, or X3 subsequences, whereby a population of randomly varied subsequences encoding X1′, X2′, or X3′ is generated; and
(iii) the population of randmly varied subsequences X1′, X2′, or X3′ is substituted, into a population of parental nucleic acids at the positions corresponding to those the encode X1, X2, or X3.

28.-41. (canceled)

42. A method of generating the library of claim 1, comprising:
(i) selecting an amino acid sequence comprising the amino acid sequence C1-X1-C2-X2 C3 X3-C4 to be encoded, wherein
(a) subsequence C1 is selected from SEQ ID NOs:1-30, subsequence C2 is selected from SEQ ID NOs:31-60, subsequence C3 is selected from SEQ ID NOs:61-90, and subsequence C4 is selected from SEQ ID NOs:91-120;
(b) each of C1-C4 comprises up to 10 single amino acid substitutions, deletions, insertions, or additions to the selected subsequence;
(c) each of X1, X2, and X3 consists of an amino acid sequence 2-20 amino acids in length;
(ii) providing a first plurality and a second plurality of oligonucleotides, wherein
(a) oligonucleotides of the first plurality encode the C1-C4 subsequences and multiple heterogeneous X1-X3 variant subsequences X1′-X3′;
(b) oligonucleotides of the second plurality are complementary to nucleotide sequences encoding the C1-C4 subsequences and to nucleotide sequences encoding multiple heterogeneous X1′ X3′ subsequences; and
(c) the oligonucleotides of the first and second pluralities have overlapping sequences complementary to one another;
(iii) combining the population of oligonucleotides to form a first mixture;
(iv) incubating the mixture under conditions effective for hybridizing the overlapping complementary sequences to form a plurality of hybridized complementary sequences; and
(v) elongating the plurality of hybridized complementary sequences to form a second mixture containing the library.

43.-51. (canceled)

52. A method of generating the library of claim 2, comprising;
(i) providing a parental nucleic acid encoding a parental polypeptide comprising the amino acid sequence: C1-X1-C2-X2-C3-X3-C4, wherein subsequence C1 is selected from FIG. 2 or FIG. 4, subsequence C2 is selected from FIG. 2 or FIG. 4, subsequence C3 is selected from FIG. 2 or FIG. 4; subsequence C4 is selected from FIG. 2 or FIG. 4 each of C1-C4 comprises up to 10 single amino acid substitutions, deletions, insertions, or additions to the selected subsequence; and each of X1-X3 is an independent subsequence consisting of 2-20 amino acids;
(ii) replicating the parental nucleic acid under conditions that introduce up to 10 single amino acid substitutions, deletions, insertions, or additions to the X1, X2, or X3 subsequences, whereby a population of randomly varied subsequences encoding X1′, X2′,or X3′ is generated; and
(iii) the population of randomly varied subsequences X1′, X2′, or X3′ is substituted, into a population of parental nucleic acids at the positions corresponding to those that encode X1, X2, or X3.

53.-66. (canceled)

67. A method of generating the library of claim 2, comprising:
(i) selecting an amino acid sequence comprising C1-X1-C2-X2 C3 X3-C4 to be encoded, wherein
(a) subsequence C1 is selected from FIG. 2 or FIG. 4, subsequence C2 is selected from FIG. 2 or FIG. 4, subsequence C3 is selected from FIG. 2 or FIG. 4, and subsequence C4 is selected from FIG. 2 or FIG. 4;
(b) each of C1-C4 comprising up to 10 single amino acid substitutions, deletions, insertions, or additions to the selected subsequence;
(c) each of X1, X2, and X3 consists of an amino acid sequence 2-20 amino acids in length;
(ii) providing a first plurality and a second plurality of oligonucleotides, wherein
(a) oligonucleotides of the first plurality encode the C1-C4 subsequences and multiple heterogeneous X1-X3 variant subsequences X1′-X3′;
(b) oligonucleotides of the second plurality are complementary to nucleotide sequences encoding the C1-C4 subsequences and to nucleotide sequences encoding multiple heterogeneous X1′ X3′ subsequences; and
(c) the oligonucleotides of the first and second pluralities have overlapping sequences complementary to one another;
(iii) combining the population of oligonucleotides to form a first mixture;
(iv) incubating the mixture under conditions effective for hybridizing the overlapping complementary sequences to form a plurality of hybridized complementary sequences; and
(v) elongating the plurality of hybridized complementary sequences to form a second mixture containing the library.

68.-76. (canceled)

77. A method of generating the library of claim 3, comprising:
(i) providing a parental nucleic acid encoding a parental polypeptide comprising the amino acid sequence: C1-X1-C2-X2-C3-X3-C4, wherein subsequence C1 is selected from FIG. 3 or FIG. 5, subsequence C2 is selected from FIG. 3 or FIG. 5, subsequence C3 is selected from FIG. 3 or FIG. 5; subsequence C4 is selected from FIG. 3 or FIG. 5; each of C1-C4 comprises up to 10 single amino acid substitutions, deletions, insertions, or additions to the selected subsequence; and each of X1-X3 is an independent subsequence consisting of 2-20 amino acids;
(ii) replicating the parental nucleic acid under conditions that introduce up to 10 single amino acid substitutions, deletions, insertions, or additions to the X1, X2, or X3 subsequences, whereby a population of randomly varied subsequences encoding X1′, X2′, or X3′is generated; and
(iii) the population of randomly varied subsequences X1′, X2′, or X3′ is substituted, into a population of parental nucleic acids at the positions corresponding to those that encode X1, X2, or X3.

78.-91. (canceled)

92. A method of generating the library of claim 3, comprising:
(i) selecting an amino acid sequence comprising: C1-X1-C2-X2 C3 X3-C4 to be encoded, wherein
(a) subsequence C1 is selected from FIG. 3 or FIG. 5, subsequence C2 is selected from FIG. 3 or FIG. 5, subsequences C3 is selected from FIG. 3 or FIG. 5, and subsequence C4 is selected from FIG. 3 or FIG. 5;
(b) each of C1-C4 comprises up to 10 single amino acid substitutions, deletions, insertions, or additions to the selected subsequence;
(c) each of X1, X2, and X3 consists of an amino acid sequence 2-20 amino acids in length;
(ii) providing a first plurality and a second plurality of oligonucleotides, wherein
(a) oligonucleotides of the first plurality encode the C1-C4 subsequences and multiple heterogeneous X1-X3 variant subsequences X1′-X3′;
(b) oligonucleotides of the second plurality are complementary to nucleotide sequences encoding the C1-C4 subsequences and to nucleotide sequences encoding multiple heterogeneous X1′ X3′ subsequences; and
(c) the oligonucleotides of the first and second pluralities have overlapping sequences complementary to one another;
(iii) combining the population of oligonucleotides to form a first mixture;
(iv) incubating the mixture under conditions effective for hybridizing the overlapping complementary sequences to form a plurality of hybridized complementary sequences; and
(v) elongating the plurality of hybridized complementary sequences to form a second mixture containing the library.

93.-101. (canceled)

102. A library of nucleic acids encoding at least ten different polypeptides, wherein
(i) the amino acid sequence of each of the encoded polypeptides comprises an amino acid sequence at least 70% identical to any of SEQ ID NOs:127-129;
(ii) the amino acid sequence of each of the encoded polypeptides includes amino acids that differ from those of SEQ ID NOs:127-129 at positions 14, 15, 33, 35-36, 38, 47-48, 66, 68-69, 71, 80, 81, 99, 101-102, and 104, and the amino acid differences are heterogeneous across a plurality of the encoded polypeptides; and
(iii) the amino acid sequence of each of the encoded polypeptides outside of the residues corresponding to positions 14, 15, 33, 35-36, 38, 47-48, 66, 68-69, 71, 80, 81, 99, 101-102, and 104 of SEQ ID NOs: 127-129 is homogeneous across a plurality of the encoded polypeptides.

103.-112. (canceled)

113. A method of generating the library of claim 102, comprising:
(i) selecting an amino acid sequence corresponding to any one of SEQ ID NOs: 127 129 to be encoded, wherein the selected sequence differs from those of SEQ ID NOs:127-129 in at least one of variable positions 14, 15, 33, 35-36, 38, 47-48, 66, 68-69, 71, 80, 81, 99, 101-102, and 104;
(ii) chemically providing a first and a second plurality of oligonucleotides, wherein
(a) oligonucleotides of the first plurality encode amino acid subsequences of the selected amino acid sequence; the subsequences being heterogeneous at the encoded variable positions;
(b) oligonucleotides of the second plurality are complementary to nucleotide sequences encoding subsequences of the selected amino acid sequence, the subsequences being heterogeneous at the encoded variable positions; and
(c) the first and second pluralities comprise oligonucleotides have overlapping sequences complementary to one another;
(iii) combining the population of oligonucleotides to form a first mixture;
(iv) incubating the mixture under conditions effective for hybridizing the overlapping complementary sequences to form a plurality of hybridized complementary sequences; and
(v) elongating the plurality of hybridized complementary sequences to form a second mixture containing the library.

114.-119. (canceled)

The application's sequence listing, which the Patent Office published only in electronic form, follows.

SEQUENCE LISTING (837 sequences)

SEQ ID NO: 1 - protein, 22 aa, Phaseolus vulgaris
PQQVHITQGDHVGKAVIVSWVT

SEQ ID NO: 2 - protein, 22 aa, Phaseolus vulgaris
PQQVHITQGDLVGKAVIVSWVT

SEQ ID NO: 3 - protein, 22 aa, Phaseolus vulgaris
PQQVHITQGDLVGRAMIISWVT

SEQ ID NO: 4 - protein, 22 aa, Phaseolus vulgaris
PQQVHITQGDLVGKAVIVSWVT

SEQ ID NO: 5 - protein, 22 aa, Phaseolus vulgaris
PQQVHITQGDHVGKAVIVSWVT

SEQ ID NO: 6 - protein, 22 aa, Phaseolus vulgaris
PQQVHITQGDHVGKAMIVSWVT

SEQ ID NO: 7 - protein, 22 aa, Phaseolus vulgaris
PQQVHITQGDHVGKAMIVSWVT

SEQ ID NO: 8 - protein, 22 aa, Phaseolus vulgaris
PQQVHITQGDHEGKTVIVSWVT

SEQ ID NO: 9 - protein, 22 aa, Phaseolus vulgaris
PQQVHITQGDLVGQAMIISWVT

SEQ ID NO: 10 - protein, 22 aa, Phaseolus vulgaris
PQQVHITQGDLVGQAMIISWVT

SEQ ID NO: 11 - protein, 22 aa, Phaseolus vulgaris
PQQVHITQGDHVGKAMIVSWVT

SEQ ID NO: 12 - protein, 22 aa, Phaseolus vulgaris
PQQVHITQGDLEGEAMIISWVR

SEQ ID NO: 13 - protein, 22 aa, Phaseolus vulgaris
PQQVHITQGDHVGKAVIVSWVT

SEQ ID NO: 14 - protein, 22 aa, Phaseolus vulgaris
PQQVHITQGDHVGQAMIISWVT

SEQ ID NO: 15 - protein, 22 aa, Phaseolus vulgaris
PQQVYITQGDHEGKGVIASWTT

SEQ ID NO: 16 - protein, 22 aa, Phaseolus vulgaris
PQQVHITQGDYEGKGVIISWVT

SEQ ID NO: 17 - protein, 22 aa, Phaseolus vulgaris
PQQVHITQGDLVGRAMIISWVT

SEQ ID NO: 18 - protein, 22 aa, Phaseolus vulgaris
PQQVHLTQGDHVGKGVIVSWVT

SEQ ID NO: 19 - protein, 22 aa, Phaseolus vulgaris
PQQVHITQGDVEGKAVIVSWVT

SEQ ID NO: 20 - protein, 22 aa, Phaseolus vulgaris
PQQVHVTQGNHEGNGVIISWVT

SEQ ID NO: 21 - protein, 22 aa, Phaseolus vulgaris
PQQVHVTQGNHEGNGVIISWVT

SEQ ID NO: 22 - protein, 22 aa, Phaseolus vulgaris
PQQVHITQGDYDGKAVIVSWVT

SEQ ID NO: 23 - protein, 22 aa, Phaseolus vulgaris
PQQVHITQGDHEGRSIIVSWIT

SEQ ID NO: 24 - protein, 22 aa, Phaseolus vulgaris
PQQVHITLGDQTGTAMTVSWVT

SEQ ID NO: 25 - protein, 22 aa, Phaseolus vulgaris
PQQVHITQGDYDGKAVIVSWVT

SEQ ID NO: 26 - protein, 22 aa, Phaseolus vulgaris
PQQVHITQGDYDGKAVIISWVT

SEQ ID NO: 27 - protein, 22 aa, Phaseolus vulgaris
PQQVHITQGDYDGEAVIISWVT

SEQ ID NO: 28 - protein, 22 aa, Phaseolus vulgaris
PQQVHITQGDYDGKAVIISWVT

SEQ ID NO: 29 - protein, 22 aa, Phaseolus vulgaris
PQQVHITQGDYDGKAVIISWVT

SEQ ID NO: 30 - protein, 22 aa, Phaseolus vulgaris
PQQVHITQGDYNGKAVIVSWVT

SEQ ID NO: 31 - protein, 21 aa, Phaseolus vulgaris
VVVYWSENSKYKKSAEGTVTT

SEQ ID NO: 32 - protein, 21 aa, Phaseolus vulgaris
EVHYWSENSDKKKIAEGKLVT

SEQ ID NO: 33 - protein, 21 aa, Phaseolus vulgaris
AVRYWSEKNGRKRIAKGKMST

SEQ ID NO: 34 - protein, 21 aa, Phaseolus vulgaris
EVHYWSENSDKKKIAEGKLVT

SEQ ID NO: 35 - protein, 21 aa, Phaseolus vulgaris
AVRYWSKNSKQKRLAKGKIVT

SEQ ID NO: 36 - protein, 21 aa, Phaseolus vulgaris
KVVYWSENSQHKKVAKGNIRT

SEQ ID NO: 37 - protein, 19 aa, Phaseolus vulgaris
KVVYWSENSQHKKVRNIRT

SEQ ID NO: 38 - protein, 21 aa, Phaseolus vulgaris
TVLYWSEKSKQKNTAKGKVTT

SEQ ID NO: 39 - protein, 21 aa, Phaseolus vulgaris
QVIYWSDSSLQNFTAEGEVFT

SEQ ID NO: 40 - protein, 21 aa, Phaseolus vulgaris
QVIYWSDSSLQNFTAEGEVFT

SEQ ID NO: 41 - protein, 21 aa, Phaseolus vulgaris
TVLYWSNNSKQKNKATGAVTT

SEQ ID NO: 42 - protein, 21 aa, Phaseolus vulgaris
KVLYWIDGSNQKHSANGKITK

SEQ ID NO: 43 - protein, 21 aa, Phaseolus vulgaris
TVVYWSEKSKLKNKANGKVTT

SEQ ID NO: 44 - protein, 21 aa, Phaseolus vulgaris
EVIYWSNSSLQNFTAEGEVFT

SEQ ID NO: 45 - protein, 21 aa, Phaseolus vulgaris
SVLYWAENSNVKSSAEGFVVS

SEQ ID NO: 46 - protein, 21 aa, Phaseolus vulgaris
TVVYWAENSSVKRRADGVVVT

SEQ ID NO: 47 - protein, 21 aa, Phaseolus vulgaris
AVRYWSEKNGRKRIAKGKMST

SEQ ID NO: 48 - protein, 21 aa, Phaseolus vulgaris
KVLYWEFNSKIKQIAKGTVST

SEQ ID NO: 49 - protein, 21 aa, Phaseolus vulgaris
KVIYWKENSTKKHKAHGKTNT

SEQ ID NO: 50 - protein, 21 aa, Phaseolus vulgaris
TVRYWCENKKSRKQAEATVNT

SEQ ID NO: 51 - protein, 21 aa, Phaseolus vulgaris
TVQYWCENEKSRKQAEATVNT

SEQ ID NO: 52 - protein, 21 aa, Phaseolus vulgaris
KVQFGTSENKFQTSAEGTVSN

SEQ ID NO: 53 - protein, 21 aa, Phaseolus vulgaris
TVFYGTSENKLDQHAEGTVTM

SEQ ID NO: 54 - protein, 21 aa, Phaseolus vulgaris
TVRYGSSPEKLDRAAEGSHTR

SEQ ID NO: 55 - protein, 21 aa, Phaseolus vulgaris
EVVYGTSPNSYDHSAQGKTTN

SEQ ID NO: 56 - protein, 21 aa, Phaseolus vulgaris
HIQYGTSENKFQTSEEGTVTN

SEQ ID NO: 57 - protein, 21 aa, Phaseolus vulgaris
EVRYGLSEGKYDVTVEGTLNN

SEQ ID NO: 58 - protein, 21 aa, Phaseolus vulgaris
QVHYGAVQGKYEFVAQGTYHN

SEQ ID NO: 59 - protein, 21 aa, Phaseolus vulgaris
QVHYGAVQGKYEFVAQGTYHN

SEQ ID NO: 60 - protein, 21 aa, Phaseolus vulgaris
EVLYGKNEHQYDQRVEGTVTN

SEQ ID NO: 61 - protein, 19 aa, Phaseolus vulgaris
YIHHCYIKGLEYDTKYYYV

SEQ ID NO: 62 - protein, 19 aa, Phaseolus vulgaris
FIHHTTIRNLEYKTKYYYE

SEQ ID NO: 63 - protein, 19 aa, Phaseolus vulgaris
FIHHTTIRKLKYNTKYYYE

SEQ ID NO: 64 - protein, 19 aa, Phaseolus vulgaris
FIHHTTIRNLEYKTKYYYE

SEQ ID NO: 65 - protein, 19 aa, Phaseolus vulgaris
FIHHTTIRNLEYNTKYYYE

SEQ ID NO: 66 - protein, 19 aa, Phaseolus vulgaris
YIHHCTIRNLEYNTKYYYE

SEQ ID NO: 67 - protein, 19 aa, Phaseolus vulgaris
YIHHCTIRNLEYNTKYYYE

SEQ ID NO: 68 - protein, 19 aa, Phaseolus vulgaris
YIHHSTIRHLEFNTKYYYK

SEQ ID NO: 69 - protein, 19 aa, Phaseolus vulgaris
FIHHTTITNLEFDTTYYYE

SEQ ID NO: 70 - protein, 19 aa, Phaseolus vulgaris
FIHHTTITNLEFDTTYYYE

SEQ ID NO: 71 - protein, 19 aa, Phaseolus vulgaris
YIHHCIIKHLKFNTKYYYE

SEQ ID NO: 72 - protein, 19 aa, Phaseolus vulgaris
FIHHCTIRRLKHNTKYHYE

SEQ ID NO: 73 - protein, 19 aa, Phaseolus vulgaris
YIHHCNIKNLKFDTKYYYK

SEQ ID NO: 74 - protein, 19 aa, Phaseolus vulgaris
FIHHTNITNLEFNTTYFYV

SEQ ID NO: 75 - protein, 19 aa, Phaseolus vulgaris
YIHHCTIKDLEFDTKYYYE

SEQ ID NO: 76 - protein, 19 aa, Phaseolus vulgaris
YIHHCTIKDLEYDTKYYYE

SEQ ID NO: 77 - protein, 19 aa, Phaseolus vulgaris
YIHHCTIKNLEYNTKYFYE

SEQ ID NO: 78 - protein, 19 aa, Phaseolus vulgaris
YIHHCTIQNLKYNTKYYYM

SEQ ID NO: 79 - protein, 19 aa, Phaseolus vulgaris
FIHHCPIRNLEYDTKYYYV

SEQ ID NO: 80 - protein, 19 aa, Phaseolus vulgaris
YIHHCLIDDLEFDTKYYYE

SEQ ID NO: 81 - protein, 19 aa, Phaseolus vulgaris
YIHHCLIDDLEFDTKYYYE

SEQ ID NO: 82 - protein, 19 aa, Phaseolus vulgaris
YVHHCLIEGLEYKTKYYYR

SEQ ID NO: 83 - protein, 19 aa, Phaseolus vulgaris
YIHHCVLTDLKYDRKYFYK

SEQ ID NO: 84 - protein, 19 aa, Phaseolus vulgaris
FIHHCTLTGLTHATKYYYA

SEQ ID NO: 85 - protein, 19 aa, Phaseolus vulgaris
YIHHCLLDKLEYDTKYYYK

SEQ ID NO: 86 - protein, 19 aa, Phaseolus vulgaris
YIHHCLIEGLEYETKYYYR

SEQ ID NO: 87 - protein, 19 aa, Phaseolus vulgaris
YIHQCLVTGLQYDTKYYYE

SEQ ID NO: 88 - protein, 19 aa, Phaseolus vulgaris
FIHHCLVSDLEHDTKYYYK

SEQ ID NO: 89 - protein, 19 aa, Phaseolus vulgaris
FIHHCLVSDLEHDTKYYYK

SEQ ID NO: 90 - protein, 19 aa, Phaseolus vulgaris
YIHHCLVDGLEYNTKYYYK

SEQ ID NO: 91 - protein, 7 aa, Phaseolus vulgaris
SREFWFR

SEQ ID NO: 92 - protein, 7 aa, Phaseolus vulgaris
TRQFWFV

SEQ ID NO: 93 - protein, 7 aa, Phaseolus vulgaris
TRRFSFI

SEQ ID NO: 94 - protein, 7 aa, Phaseolus vulgaris
TRQFWFV

SEQ ID NO: 95 - protein, 7 aa, Phaseolus vulgaris
TRQFWFV

SEQ ID NO: 96 - protein, 7 aa, Phaseolus vulgaris
TRSFWFT

SEQ ID NO: 97 - protein, 7 aa, Phaseolus vulgaris
TRSFWFT

SEQ ID NO: 98 - protein, 7 aa, Phaseolus vulgaris
ARTFWFV

SEQ ID NO: 99 - protein, 7 aa, Phaseolus vulgaris
TRQFWFI

SEQ ID NO: 100 - protein, 7 aa, Phaseolus vulgaris
TRQFWFI

SEQ ID NO: 101 - protein, 7 aa, Phaseolus vulgaris
PRTFWFV

SEQ ID NO: 102 - protein, 7 aa, Phaseolus vulgaris
VRSFWFM

SEQ ID NO: 103 - protein, 7 aa, Phaseolus vulgaris
ARTFWFT

SEQ ID NO: 104 - protein, 7 aa, Phaseolus vulgaris
TRQFWFI

SEQ ID NO: 105 - protein, 7 aa, Phaseolus vulgaris
TRKFWFV

SEQ ID NO: 106 - protein, 7 aa, Phaseolus vulgaris
KRQFWFV

SEQ ID NO: 107 - protein, 7 aa, Phaseolus vulgaris
TRQFWFT

SEQ ID NO: 108 - protein, 7 aa, Phaseolus vulgaris
RRTFWFV

SEQ ID NO: 109 - protein, 7 aa, Phaseolus vulgaris
ERKFWFF

SEQ ID NO: 110 - protein, 7 aa, Phaseolus vulgaris
SRRFWFF

SEQ ID NO: 111 - protein, 7 aa, Phaseolus vulgaris
SRRFWFF

SEQ ID NO: 112 - protein, 7 aa, Phaseolus vulgaris
SREFWFE

SEQ ID NO: 113 - protein, 7 aa, Phaseolus vulgaris
ARLFWFK

SEQ ID NO: 114 - protein, 7 aa, Phaseolus vulgaris
VRTFSFT

SEQ ID NO: 115 - protein, 7 aa, Phaseolus vulgaris
AREFWFH

SEQ ID NO: 116 - protein, 7 aa, Phaseolus vulgaris
SREFWFK

SEQ ID NO: 117 - protein, 7 aa, Phaseolus vulgaris
ARKFWFE

SEQ ID NO: 118 - protein, 7 aa, Phaseolus vulgaris
SREFWFV

SEQ ID NO: 119 - protein, 7 aa, Phaseolus vulgaris
SREFWFV

SEQ ID NO: 120 - protein, 7 aa, Phaseolus vulgaris
AREFWFE

SEQ ID NO: 121 - protein, 7 aa, Artificial Sequence
  Synthetically generated peptide
  VARIANT 1: Xaa = Met, Val, Glu, Pro, Gln, Thr, Ala or  Phe
  VARIANT 2: Xaa = Asp, Glu,  Asn, Val, Ser, Ile or Ala
  VARIANT 3: Xaa = Glu, Ala, lys or Asp
  VARIANT 4: Xaa = Pro, Lys or Leu
  VARIANT 6: Xaa = Ser, Pro, Lys, His or Thr
  VARIANT (7)...(0): Xaa = Ser, Asn, Lys or Thr
XXXXGXX

SEQ ID NO: 122 - protein, 9 aa, Artificial Sequence
  Synthetically generated peptide
  VARIANT 2: Xaa = Lys, Arg, Thr or Phe
  VARIANT 3: Xaa = Tyr or Phe
  VARIANT 4: Xaa = Tyr, Phe or His
  VARIANT 5: Xaa = Asn, Thr, Lys, Asp or Glu
  VARIANT 7: Xaa = Thr, Ser, Asn, Lys or Glu
  VARIANT (9)...(0): Xaa = Gly or Pro
YXXXXYXSX

SEQ ID NO: 123 - protein, 6 aa, Artificial Sequence
  Synthetically generated peptide
  VARIANT 1: Xaa = Val, Ile, Leu or Met
  VARIANT 2: Xaa = Gly or Glu
  VARIANT 3: Xaa = Leu, Ile, Val, Glu, Thr, Ser, Glu, Phe or Lys
  VARIANT 4: Xaa = Arg, Gly, Glu or Asp
  VARIANT 5: Xaa = Asn, His, Asp, Gln, Lys, Ser or Glu
XXXXXT

SEQ ID NO: 124 - protein, 91 aa, Artificial Sequence
  Synthetically generated peptide
PQQVHITQGDHVGKAVIVSWVTMDEPGSSVVVYWSENSKYKKSAEGTVTTYRFYNYTSGYIHHCYIKGLEYDTKYYYVVGIGNTSREFWFR

SEQ ID NO: 125 - protein, 91 aa, Artificial Sequence
  Synthetically generated peptide
PQQVHITQGDLVGKAVIVSWVTVDEPGSSEVHYWSENSDKKKIAEGKLVTYRFFNYSSGFIHHTTIRNLEYKTKYYYEVGLGNTTRQFWFV

SEQ ID NO: 126 - protein, 91 aa, Artificial Sequence
  Synthetically generated peptide
PQQVHITQGDLVGRAMIISWVTMDEPGSSAVRYWSEKNGRKRIAKGKMSTYRFFNYSSGFIHHTTIRKLKYNTKYYYEVGLRNTTRRFSFI

SEQ ID NO: 127 - protein, 123 aa, Artificial Sequence
  Synthetically generated peptide
GDDLGKKLHLAASRGHLEIVRVLVEAGADVNALDKFGRTALHIAASRGHLEVVKLLLEAGADVNALDKFGRTALHLAASRGHLEVVKLLLEAGADVNALDKFGDTALHVSIDNGNEDIAEILQ

SEQ ID NO: 128 - protein, 123 aa, Artificial Sequence
  Synthetically generated peptide
GDDLGKKLHLAASRGHLEIVRVLVEAGADVNALDKFGRTPLHIAASKGNEQVVKLLLEAGADPNALDKFGRTPLHIAASKGNEQVVKLLLEAGADPNAQDKFGDTALHVSIDNGNEDIAEILQ

SEQ ID NO: 129 - protein, 123 aa, Artificial Sequence
  Synthetically generated peptide
GSDLGKKLLEAARAGQDDEVRILMANGADVNALDKFGRTPLHIAASKGNEQVVKLLLEAGADPNALDKFGRTPLHIAASKGNEQVVKLLLEAGADPNAQDKFGKTAFDISIDNGNEDLAEILQ

SEQ ID NO: 130 - protein, 102 aa, Oryza sativa
MSSVGGPVLGGVEPVGNENDLHLVDLARFAVTEHNKKANSLLEFEKLVSVKQQVVAGTLYYFTLEVKEGDAKKLYEAKVWEKPWMDFKELQEFKPVDASANA

SEQ ID NO: 131 - protein, 156 aa, Oryza sativa
MAGSGVLEVHLVDAKGLTGNDFLGKIDPYVVVQYRSQERKSSVARDQGKNPSWNEVFKFQINSTAATGQHKLFLRLMDHDTFSRDDFLGEATINVTDLISLGMEHGTWEMSESKHRVVLADKTYHGEIRVSLTFTASAKAQDHAEQVGGWAHSFRQ

SEQ ID NO: 132 - protein, 28 aa, Artificial Sequence
  Synthetically generated peptide
GEVIGISVNDPRVKEIAEFALKQHAEQN

SEQ ID NO: 133 - protein, 28 aa, Artificial Sequence
  Synthetically generated peptide
GEVIGIQVNDPRVKEIAEFALKQHAEQN

SEQ ID NO: 134 - protein, 28 aa, Artificial Sequence
  Synthetically generated peptide
GGVIGISVNDPRVKEIAEFALKQHAEQN

SEQ ID NO: 135 - protein, 89 aa, Artificial Sequence
  Synthetically generated peptide
GGYVPCKDPNDPHVKDIAEWAVAEYNKSQGHHLTLVSILKCESQVVAGVNWRLVLKCKDENNGEGNYETVVWEKIWENFRQLITFDHLL

SEQ ID NO: 136 - protein, 54 aa, Artificial Sequence
  Synthetically generated peptide
GGYSPIKNLNDHHLIEIANFAVTEYGKQQGIKQIKLEKITKGETQVVDGTNYRL

SEQ ID NO: 137 - protein, 55 aa, Artificial Sequence
  Synthetically generated peptide
GGYSPIKNLNDPHVIEIANFAVTEYGKQQRFYSKLDKIIKGESQAVDGTNYRFIL

SEQ ID NO: 138 - protein, 73 aa, Artificial Sequence
  Synthetically generated peptide
GGWSPIKDINDPHVIVIANFAVTEYNKHTGANLKLDKLIKGESQVTSGIYYDLILSAGDGSHSNIYKALVWEK

SEQ ID NO: 139 - protein, 73 aa, Artificial Sequence
  Synthetically generated peptide
GGWEPIKNINDPHVIDIANYAVTEHDKQAQLKLEKVISGETKVVDGIIYCLNITASDGSNKYNLAVLEKLEQH

SEQ ID NO: 140 - protein, 63 aa, Artificial Sequence
  Synthetically generated peptide
GNLSPINNINDPKVIDVANFAVKEYNNRRRKPEEKLRLWKVIKGESQIVADGVNYRLTLSATK

SEQ ID NO: 141 - protein, 31 aa, Artificial Sequence
  Synthetically generated peptide
LQFSRVVSAQKQVVAGLKYYLRIEVTQPNGS

SEQ ID NO: 142 - protein, 31 aa, Artificial Sequence; identical to SEQ ID NO: 141
  Synthetically generated peptide

SEQ ID NO: 143 - protein, 66 aa, Artificial Sequence
  Synthetically generated peptide
GARTEVPDVEGDGEVQELGRFSVAEYNRQLREGGGGGGRLEFGRVVAAQRQVVSGLKYYLRVVAVE

SEQ ID NO: 144 - protein, 65 aa, Artificial Sequence
  Synthetically generated peptide
GARTEVRDVEGDGEVQELGRFSVAEYNRQLRDGGGGGRLEFGRVVAAQRQVVSGLKYYLRVVAVE

SEQ ID NO: 145 - protein, 66 aa, Artificial Sequence
  Synthetically generated peptide
GGRTEVRDVEGDREVQELGRFSVEEHNRRRRSRDCGDVRLEFGRVVAAQRQVVSGLKYYLRVAAAE

SEQ ID NO: 146 - protein, 70 aa, Artificial Sequence
  Synthetically generated peptide
GGRTEIRDVGSNKAVQSLGRFAVAEHNRRLRHGGSGGPADPVPVKLAFARVVEAQKQVVSGVAYYLKVAA

SEQ ID NO: 147 - protein, 67 aa, Artificial Sequence
  Synthetically generated peptide
GGRKEIENVKTNKEVQELGRFSVEEYNRQRGTQKMDGGGELQFLEVVEAQSQVVSGIKYYLKVSAVR

SEQ ID NO: 148 - protein, 64 aa, Artificial Sequence
  Synthetically generated peptide
GGRTKVKNVKTDTEIQQLGSYSVDEYNRLQRTKKTGAGDLKFSQVIAAETQVVAGTKYYLKIEA

SEQ ID NO: 149 - protein, 100 aa, Artificial Sequence
  Synthetically generated peptide
GGRTEIPDVESNEEIQQLGEYSVEQYNQQHHNGDGGDSTDSAGDLKFVKVVAAEKQVVAGIKYYLKIVAAKGGHKKKFDAEIVVQAWKKTKQLMSFAPSH

SEQ ID NO: 150 - protein, 38 aa, Artificial Sequence
  Synthetically generated peptide
FSVDEYNSKNKSNLKLLKVVKAEEQVVAGKKYYLKISA

SEQ ID NO: 151 - protein, 88 aa, Artificial Sequence
  Synthetically generated peptide
GGVEPVGNENDLHLVDLARFAVTEHNKKANSLLEFEKLVSVKQQVVAGTLYYFTIEVKEGDAKKLYEAKVWEKPWMDFKELQEFKPVD

SEQ ID NO: 152 - protein, 89 aa, Artificial Sequence
  Synthetically generated peptide
GGIKDVPANENDLHLQELARFAVDEHNKKANALLGYEKLVKAKTQVVAGTMYYLTIEVKDGEVKKLYEAKVWEKPWENFKELLEFKPVE

SEQ ID NO: 153 - protein, 89 aa, Artificial Sequence
  Synthetically generated peptide
GGIKDVPANENDLHLQELARFAVDEHNKKANALLGYEKLVKAKTQVVAGTMYYLTVEVKDGEVKKLYEAKVWEKPWENFKELQEFKPVE

SEQ ID NO: 154 - protein, 89 aa, Artificial Sequence
  Synthetically generated peptide
GGIKDVPGNENDLHLQELARFAVDEHNKKANALLGFEKLVKAKTQVVAGTMYYLTIEVKDGEVKKLYEAKVWEKPWENFKELQEFKPVE

SEQ ID NO: 155 - protein, 89 aa, Artificial Sequence; identical to SEQ ID NO: 154
  Synthetically generated peptide

SEQ ID NO: 156 - protein, 89 aa, Artificial Sequence
  Synthetically generated peptide
GGIKDVPGNENDLHLQELARFAVDEHNKKANALLGFEKLVKAKTQVVAGTMYYLTIEVKDGEVKKLYEAKVWEKPWENFKELQEFKPVD

SEQ ID NO: 157 - protein, 89 aa, Artificial Sequence
  Synthetically generated peptide
GGIQDVPGSENDLHLQELARFAVDEHNKKANALLGFEKLVKVKTQVVAGTMYYLTIEVKDGEVKKLYEAKVWEKPWENLKGLQEFKPVE

SEQ ID NO: 158 - protein, 89 aa, Artificial Sequence
  Synthetically generated peptide
GGIQDVPGSENDLHLQELARFAVDEHNKKANALLGFEKLVKAKTQVVAGTMYYLTIEVKDGEVKKLYEAKVWEKPWENLKGLQEFKPVE

SEQ ID NO: 159 - protein, 89 aa, Artificial Sequence
  Synthetically generated peptide
GGIKDVPGNENDLHLQELARFAVDEHNKKANALLGFEKLVKAKTQVVAGTMYYLTIEVKDGEVKKLYEAKVWEKPWENLKGLQEFKPVE

SEQ ID NO: 160 - protein, 89 aa, Artificial Sequence
  Synthetically generated peptide
GGIQDVPGSENDLHLQELARFAVDEHNKKANALLGFEKLVKAKTQVVAGTMYYLTIEVKDGEVKKLYEAKVWEKPWENFKELQEFKPVE

SEQ ID NO: 161 - protein, 89 aa, Artificial Sequence
  Synthetically generated peptide
GGIQDVPENENDLHLQELARFAVDEHNKKANALLGFEKLVKAKTQVVAGTMYYLTIEVKDGEVKKLYEAKVWEKPWEKFKELQEFKPVE

SEQ ID NO: 162 - protein, 89 aa, Artificial Sequence
  Synthetically generated peptide
GGIKDVPANENDLQLQELARFAVNEHNQKANALLGFEKLVKAKTQVVAGTMYYLTIEVKDGEVNKLYEAKVWEKPWENFKQLQEFKPVE

SEQ ID NO: 163 - protein, 89 aa, Artificial Sequence
  Synthetically generated peptide
GGIKDVPANENDLQLQELARFAVNEHNQKANALLGFEKLVKAKTQVVAGTMYYLTIEVKDGEVKKLYEAKVWEKPWENFKQLQEFKPVE

SEQ ID NO: 164 - protein, 67 aa, Artificial Sequence
  Synthetically generated peptide
VSEHKNKTNALLEFEKVVRLKQQVVAGMMYYITIQVNEGGAKKMYEAKVWERPWMDFKKLMEFRPAE

SEQ ID NO: 165 - protein, 72 aa, Artificial Sequence
  Synthetically generated peptide
LARFAVSEHKNKTNALLEFEKVVRLKQQVVAGMTYYITIQVNEGGAKKMYEAKVWERPWMDFKKLMEFRPAE

SEQ ID NO: 166 - protein, 89 aa, Artificial Sequence
  Synthetically generated peptide
GGIVDSLRRENDPYIVDLARFAVSEHNKEGNTQLELEKVVKVKEQAVAGRLYYITIQVDEGGAKKLYEAKVLEQLWLDVKKLVEFKPAE

SEQ ID NO: 167 - protein, 83 aa, Artificial Sequence
  Synthetically generated peptide
LGRENDPYIVDLARFAVSEHNKEGNTQLELEKVVKVKEQAVAGRLYYITIQVDEGGAKKLYEAKVLEQLWLDVKKLVEFKPAE

SEQ ID NO: 168 - protein, 83 aa, Artificial Sequence
  Synthetically generated peptide
PGRENDPYIVDLARFAVSQHNKEANTQLELEKVVKVKEQAIAGRLYYITIQVDEGGAKKLYKAKVLEQLWLDVKKLLEFKPAE

SEQ ID NO: 169 - protein, 88 aa, Artificial Sequence
  Synthetically generated peptide
GGISDSPMGQENDLDVIARFAVSEHNNKANALLEFENVVKVKKQTVAGTMHYITIRVTEGGAKKLYEAKVWEKPWENFKKLEEFKLVE

SEQ ID NO: 170 - protein, 88 aa, Artificial Sequence; identical to SEQ ID NO: 169
  Synthetically generated peptide

SEQ ID NO: 171 - protein, 88 aa, Artificial Sequence
  Synthetically generated peptide
GGIKDSPMGQENDLDVIARFAVSEHNNKANALLEFENVVKLKKQTVAGTMHYITIRVTEGGAKKLYEAKVWEKPWENFKQLQEFKPVE

SEQ ID NO: 172 - protein, 83 aa, Artificial Sequence
  Synthetically generated peptide
GDVRDAPVGRENDLEAIELARFAVAEHNSKTNAMLEFERLVKVRHQVVAGTLHHFTVEVKEAGGGEKKLYEAKVWEKAWENFK

SEQ ID NO: 173 - protein, 92 aa, Artificial Sequence
  Synthetically generated peptide
GDVRDAPVGRENDLEAIELARFAVAEHNSKTNAMLEFERLVKVRHQVVAGTLHHFTVEVKEAGGGEKKLYEAKVWEKAWENFKQLQSFELVG

SEQ ID NO: 174 - protein, 81 aa, Artificial Sequence
  Synthetically generated peptide
ENDLEAIELARFAVAEHNSKTNAMLEFERLVKVRHQVVAGTMHHFTVQVKEAGGGKKLYEAKVWEKVWENFKQLQSFQPVG

SEQ ID NO: 175 - protein, 90 aa, Artificial Sequence
  Synthetically generated peptide
GGVQDAPAGRENDLETIELARFAVAEHNAKANALLEFEKLVKVRQQVVAGCMHYFTIEVKEGGAKKLYEAKVWEKAWENFKQLQEFKPAA

SEQ ID NO: 176 - protein, 90 aa, Artificial Sequence
  Synthetically generated peptide
GGVQDAPAGRENDLETIELARFAVAEHNAKANALLEFERLVKVRQQVVAGCMHYFTIEVKEGGAKKLYEAKVWEKAWENFKQLQEFKPAA

SEQ ID NO: 177 - protein, 91 aa, Artificial Sequence
  Synthetically generated peptide
GGIHDAPAGRENDLTTVELARFAVAEHNSKANAMLELERVVKVRQQVVGGFMHYLTVEVKEPGGANKLYEAKVWERAWENFKQLQDFKPLD

SEQ ID NO: 178 - protein, 90 aa, Artificial Sequence
  Synthetically generated peptide
GGIYDAPLNNENGFDKEDLARFAVREYNNKNNALLEFVRVVKAKEQVVSGMMHYLTVEVNDAGKKKLYEAKVWEQVWMNFRQLQEFTYLG

SEQ ID NO: 179 - protein, 89 aa, Artificial Sequence
  Synthetically generated peptide
GTSRDVDPNANDLQVESLARFAVDEHNKKENVSLEYRRLIGAKTQVVAGTMHHLTVEVADGETKKVYEAKVLEKAWENLKKLEDFTHLR

SEQ ID NO: 180 - protein, 89 aa, Artificial Sequence
  Synthetically generated peptide
GGVRDVDPNANDLQVESLARFAVDEHNKKENVSLEYRRLIGAKTQVVAGTMHHLTVEVADGETKKVYEAKVLEKAWENLKKLEDFTHLR

SEQ ID NO: 181 - protein, 89 aa, Artificial Sequence
  Synthetically generated peptide
GGVRDIDANANDLQVESLARFAVDEHNKNENLTLEYKRLLGAKTQVVAGTMHHLTVEVADGETNKVYEAKVLEKAWENLKQLESFNHLH

SEQ ID NO: 182 - protein, 89 aa, Artificial Sequence
  Synthetically generated peptide
GGVRDIDANANDLQVESLARFAVDEHNKNENLTLEYKRLLGAKTQVVAGTMHHLTVEVADGETNKVYEAKVLEKAWENLKQLESFNHHH

SEQ ID NO: 183 - protein, 87 aa, Artificial Sequence
  Synthetically generated peptide
GGVHDSQSSQNSAEIDGLARFAVDEHNKKENAIFARVVKAKEQVVAGTMHHLTIEAIEAGKKKLYEAKVWVKPWLNFKELHEFKDAS

SEQ ID NO: 184 - protein, 87 aa, Artificial Sequence; identical to SEQ ID NO: 183
  Synthetically generated peptide

SEQ ID NO: 185 - protein, 87 aa, Artificial Sequence
  Synthetically generated peptide
GGVHDSQSSQNSAEIDGLARFAVDEHNKKENAIFARVVKAKEQVVAGTMHHLTIEAIEAGKKKLYEAKVWAKPWLNFKELHEFKDAS

SEQ ID NO: 186 - protein, 87 aa, Artificial Sequence
  Synthetically generated peptide
GGVHDSQSSQNSAEIDGLARFAVDEHNKKENAIFARVVKAKEQVVAGTMHHLTIEAIEVGKKKLYEAKAWVKPWLNFKELHEFKDAS

SEQ ID NO: 187 - protein, 87 aa, Artificial Sequence
  Synthetically generated peptide
GGVHDSQSSQNSAEIDGLARFAVDEHNKKENAIFARVVKAKEQVVAGTMHHLTIEAIEVGKKKLYEAKVWVKPWLNFKELHEFKDAS

SEQ ID NO: 188 - protein, 87 aa, Artificial Sequence
  Synthetically generated peptide
GGVQDSQSSQNSAEIDGLARFAVDEHNKKENAIFARVVKAKEQVVAGTMHHLTIEAIEAGKKKLYEAKVRVKPWLNFKELHEFKDAS

SEQ ID NO: 189 - protein, 87 aa, Artificial Sequence
  Synthetically generated peptide
GGVHDSQSSQNSAEIDGLARFAVDEHNKKENAIFARVVKPKDQVFAGPMHHLTIEAIEAGKKKLNEAKVWVNPWLNFKELHEFKDAG

SEQ ID NO: 190 - protein, 87 aa, Artificial Sequence
  Synthetically generated peptide
GGVHDSQSSQNSAEIDGLARFAVDEHNKKENAIFARVVKPKEQVFAGPMHHLTIEAIEAGKKKLYEAKVWVNPWLNFKELHEFKDAG

SEQ ID NO: 191 - protein, 87 aa, Artificial Sequence
  Synthetically generated peptide
GGVHDSQSSQNSAEIDGLARFAVDEHNKKENAIFARVVKPKEQVFAGTMHHLTIEAIEAGKKKLYEAKVWVKPWLNFKELHEFKDAG

SEQ ID NO: 192 - protein, 87 aa, Artificial Sequence
  Synthetically generated peptide
GGVQDSQSSQNSAEIDGLARFAVDEHNKKENAIFARVVKAKEQVFAGPMHHLTIEAIEAGKKKLYEAKVWVKPWLNFKESHEFKDAG

SEQ ID NO: 193 - protein, 87 aa, Artificial Sequence
  Synthetically generated peptide
GGVHDSQSSQNSAEIDGLARFAVDEHNKKENAIFARVVKAKEQVFAGTMHHLTIEAIEAGKKKLYEAKVWVKPWLNFKELHEFKDAG

SEQ ID NO: 194 - protein, 87 aa, Artificial Sequence; identical to SEQ ID NO: 193
  Synthetically generated peptide

SEQ ID NO: 195 - protein, 87 aa, Artificial Sequence
  Synthetically generated peptide
GGVHDSQSSQNSAEIDGLARFAVDEHNKKENAIFARVVKAKEQVFAGTMHHLTIEAIEAGKKKLYEAKVWVKPWLNFKELHEFKDAS

SEQ ID NO: 196 - protein, 87 aa, Artificial Sequence
  Synthetically generated peptide
GGVHDSQSSQNSAEIDGLARFAVDEHNKKENAIFARLVKAKDQVFAGTMHHLTIEAIEAGKKKLYEAKVWVNPWLNFKELHEFKDAS

SEQ ID NO: 197 - protein, 87 aa, Artificial Sequence
  Synthetically generated peptide
GGVHDSQSSQNSAEIDGLARFAVDEHNKKENAIFARLVKAKEQVVAGTMHHLTIEAIEAGKKKLYEAKVWVKPWLNFKELHEFKDAG

SEQ ID NO: 198 - protein, 87 aa, Artificial Sequence
  Synthetically generated peptide
GGVHDSQSSQNSAEIDGLARFAVDEHNKKENAIFARLVKAKEQVVAGTMHHLTVEAIEAGKKKLYEAKVWVKPWLNFKELHEFKDAS

SEQ ID NO: 199 - protein, 87 aa, Artificial Sequence
  Synthetically generated peptide
GGVHDSQSSQNSAEIDGLARFAVDEHNKKENAIFARVVKAKEQVVAGPMHHLTIEAIEAGKKKLYEAKVWVKPWLNFKELHEFKDAS

SEQ ID NO: 200 - protein, 87 aa, Artificial Sequence
  Synthetically generated peptide
GGVHDSQSSQNSAEIDGLARFAVDEHNKKENAIFARVVKAKEQVVAGPMHHLTIEAIEAGKKKLYEAKVWVKPWLNFKELHEFKDAG

SEQ ID NO: 201 - protein, 87 aa, Artificial Sequence
  Synthetically generated peptide
GGVHDSQSSQNSAEIDGLARFAVDEHNKKENAIFARVVKAKEQVVAGTMHHLTIEAIEAGKKKLYEAKVWVKPWLNFKELHEFKDAG

SEQ ID NO: 202 - protein, 87 aa, Artificial Sequence; identical to SEQ ID NO: 201
  Synthetically generated peptide

SEQ ID NO: 203 - protein, 87 aa, Artificial Sequence; identical to SEQ ID NO: 201
  Synthetically generated peptide

SEQ ID NO: 204 - protein, 87 aa, Artificial Sequence
  Synthetically generated peptide
GGVHDSQSSQNSAEIDGLARLAVDEHNKKENAIFARVVKAKEQVVAGTMHHLTIEAIEAGKKRLYEAKVWVKPWLNFKELHEFKDAG

SEQ ID NO: 205 - protein, 87 aa, Artificial Sequence
  Synthetically generated peptide
GGVHDSQSSQNSAEIDGLARFAIDEHNKKENAIFARVVKAKEQVVAGTMHHLTIEAIEAGKKKLYEAKVWVKPWLNFKELHEFKDAG

SEQ ID NO: 206 - protein, 87 aa, Artificial Sequence
  Synthetically generated peptide
GGVHDSQSSQNSAEIDSLARFAVDEHNKKENAIFARVVKAKEQVVAGTMHHLTIEAIEAGKKKLYEAKVWVKPWLNFKELHEFKDAG

SEQ ID NO: 207 - protein, 87 aa, Artificial Sequence
  Synthetically generated peptide
GGVHDSQTSQNSAEIDGLARFAVDEHNKKENAIFARVVKAKEQVVAGTMHHLTIEAIEAGKKKLYEAKVWVKPWLNFKELHEFKDAS

SEQ ID NO: 208 - protein, 89 aa, Artificial Sequence
  Synthetically generated peptide
GGVHDSQSSQNSAEIDGLARFAVDEHNKKENAMLEFARVVKAKEQVVAGTMHHLTIEAIEAGKKKLYEAKVWVKPWLNFKELHEFKDAS

SEQ ID NO: 209 - protein, 90 aa, Artificial Sequence
  Synthetically generated peptide
GGVHDSPQGTANNAEIDGIARFAVDEHNKKENAMVEFGRVLKAKEQVVAGTLHHLTIEAIEAGKKKIYEAKVWVKPWLNFKELQEFKHAT

SEQ ID NO: 210 - protein, 89 aa, Artificial Sequence
  Synthetically generated peptide
GGVHESHGAQNSAEVEDLARFAVQEHNNKENALLEFVSVVKAKEQVVAGTLHHLTIEAIEAGKKKLYQAKVWVKPWMGFKEVQEFKHAD

SEQ ID NO: 211 - protein, 89 aa, Artificial Sequence
  Synthetically generated peptide
GGIVDVEGAQNSAEVEELARFAVDEHNKKENALLQFSRLVKAKQQVVSGIMHHLTVEVIEGGKKKVYEAKVWVQAWLNSKKLHEFSPIG

SEQ ID NO: 212 - protein, 87 aa, Artificial Sequence
  Synthetically generated peptide
GGVGDVPANQNSGEVESLARFAVDEHNKKENALLEFARVVKAKEQVVAGTLHHLTLEIAGQKKLYEAKVWVKPWLNFKELQEFKPAS

SEQ ID NO: 213 - protein, 87 aa, Artificial Sequence; identical to SEQ ID NO: 212
  Synthetically generated peptide

SEQ ID NO: 214 - protein, 87 aa, Artificial Sequence; identical to SEQ ID NO: 212
  Synthetically generated peptide

SEQ ID NO: 215 - protein, 87 aa, Artificial Sequence
  Synthetically generated peptide
GGVGDVPANQNSGEVESLARFAVDEHNKKENALLEFARVVKAKEQVVAGTLHHLTLEIAGQKKLYEAKVWVKPWLNFKELQEFTPAS

SEQ ID NO: 216 - protein, 87 aa, Artificial Sequence
  Synthetically generated peptide
GGVRDVPANQNSGEVESLARFAVDEHNKKENALLEFARVVKAKEQVVAGTLHHLTLEIAGEKKLYEAKVWVKPWLNFKELQEFKPAS

SEQ ID NO: 217 - protein, 88 aa, Artificial Sequence
  Synthetically generated peptide
GGVRDVPANQNSGEVESLARFAVDEHNKKENALLEFARVVKAKEQVVAGTMHHLTLEIIEAGKKLYEAKVWVKPWLNFKELQEFKPAS

SEQ ID NO: 218 - protein, 89 aa, Artificial Sequence
  Synthetically generated peptide
GGVRDVPSNENSVEVESLARFAVDEHNKKENALLEFARVVKAKEQVVAGTMHHLTLEIIEAGKKKLYEAKVWVKPWLNFKELQEFKPST

SEQ ID NO: 219 - protein, 89 aa, Artificial Sequence
  Synthetically generated peptide
GGVRDLPANENSVEVESLARFAVDEHNKKENALLEFARVVKAKEQVVAGTMHHLTLEIIEAGKKKLYEAKVWVKPWLNFKELQEFKPAS

SEQ ID NO: 220 - protein, 87 aa, Artificial Sequence
  Synthetically generated peptide
GGVHDLRGNQNSGEIESLARFAIQEHNKQQNKIFKKIVKAREQVVAGTMYHLTLEAKEGDQTKNFEAKVWVKPWMNFKQLQEFKESS

SEQ ID NO: 221 - protein, 87 aa, Artificial Sequence; identical to SEQ ID NO: 220
  Synthetically generated peptide

SEQ ID NO: 222 - protein, 87 aa, Artificial Sequence; identical to SEQ ID NO: 220
  Synthetically generated peptide

SEQ ID NO: 223 - protein, 87 aa, Artificial Sequence; identical to SEQ ID NO: 220
  Synthetically generated peptide

SEQ ID NO: 224 - protein, 89 aa, Artificial Sequence
  Synthetically generated peptide
GGIQDSPSSENSLEIESLARFAVDQHNAKQNSLLEFARVVKAREQVVAGTLHHLTLEAIDAGEKKIYEAKVWVKPWMNFKELTEFKHAG

SEQ ID NO: 225 - protein, 89 aa, Artificial Sequence; identical to SEQ ID NO: 224
  Synthetically generated peptide

SEQ ID NO: 226 - protein, 87 aa, Artificial Sequence
  Synthetically generated peptide
GGLRDSQGSQNSVQTEARFAVDEHNKKQNSLLEFSRVVRTQEQVVAGTLHHLTLEAIEAGEKKLYEAKVWVKPWLNFKELQEFKPAG

SEQ ID NO: 227 - protein, 89 aa, Artificial Sequence
  Synthetically generated peptide
GGVKENPAAANSADSDGLGRFAVDEHNRRENALLEFVRVVEAKEQVVAGTLHHLTLEAVEAGRKKLYEAKVWVKPWLDFKELQEFSHKG

SEQ ID NO: 228 - protein, 89 aa, Artificial Sequence
  Synthetically generated peptide
GGVKENPAAANSAESDGLGRFAVDEHNRRENALLEFVRVVEAKEQVVAGTLHHLTLEAVEAGRKKLYEAKVWVKPWLDFKELQEFSHKG

SEQ ID NO: 229 - protein, 89 aa, Artificial Sequence
  Synthetically generated peptide
GGKSENPAAANSLETDGLARFAVDEHNKRENALLEFVRVVEAKEQTVAGTVHHLTLEALEAGRKKLYEAKVWVKPWLDFKELQEFRHTG

SEQ ID NO: 230 - protein, 87 aa, Artificial Sequence
  Synthetically generated peptide
GGAHDAPSAANSVETDARFAVDEHNKRENALLEFVRVVEAKEQVVAGTLHHLTLEALEAGRKKVYEAKVWVKPWLDFKELQEFRNTG

SEQ ID NO: 231 - protein, 90 aa, Artificial Sequence
  Synthetically generated peptide
GGVHDSHGSSQNSDEIHSLAKLAVDEHNKKENAMIELARVVKAQEQTVAGKLHHLTLEVMDAGKKKLYEAKVWVKPWLNFKELQEFKHVE

SEQ ID NO: 232 - protein, 90 aa, Artificial Sequence
  Synthetically generated peptide
GGVHDSHGSSQNSDEIHSLAKFAVDEHNKKENAMIELARVVKAQEQTVAGKLHHLTLEVMDAGKKKLYEAKVWVKPWLNFKELQEFKHVE

SEQ ID NO: 233 - protein, 90 aa, Artificial Sequence
  Synthetically generated peptide
GGIRDSHPESQNSDEIHSLAKFAVDEHNKKENAMFELARVVKAKEQVVAGTLHHLTLEVVDAGKKKLYEAKVWVKPWLNFKELQEFTHVE

SEQ ID NO: 234 - protein, 89 aa, Artificial Sequence
  Synthetically generated peptide
GGISDSASAENSVEIESLARFAVEEHNKKENAMIELVRVVKAEEQVVAGKLHHLTLEVIDAGKRKLYEAKVWLKPWMNFKELQGFNHIE

SEQ ID NO: 235 - protein, 89 aa, Artificial Sequence; identical to SEQ ID NO: 234
  Synthetically generated peptide

SEQ ID NO: 236 - protein, 90 aa, Artificial Sequence
  Synthetically generated peptide
GGFSDSKNDWNGGKEIDDIALFAVQEHNRRENAVLELARVLKATEQVVAGKLYRLTLEVIEAGEKKIYEAKVWVKPWMNFKQLQEFKNII

SEQ ID NO: 237 - protein, 90 aa, Artificial Sequence; identical to SEQ ID NO: 236
  Synthetically generated peptide

SEQ ID NO: 238 - protein, 86 aa, Artificial Sequence
  Synthetically generated peptide
GGVHDSNSNPDTHSLARFAVDQHNTKENGLLELVRVVEAREQVVAGTLHHLVLEVLDAGKKKLYEAKIWVKPWMDFKQLQEFKHVR

SEQ ID NO: 239 - protein, 64 aa, Artificial Sequence
  Synthetically generated peptide
AHYNKNQGAALEFTRVLKSKRQVVTGTLHDLIAADAGKKSVYRAKVWVKPWEDFKSVVEFRLVG

SEQ ID NO: 240 - protein, 84 aa, Artificial Sequence
  Synthetically generated peptide
GVLAALRERAEAEDAARFAVAHYNKNQGAALEFTRVLKSKRQVVTGTLHDLIAADAGKKSVYRAKVWVKPWEDFKSVVEFRLVG

SEQ ID NO: 241 - protein, 85 aa, Artificial Sequence
  Synthetically generated peptide
GMLAAIRREQAEAEDAARFAVAEYNKNQGAELEFARIVKAKRQVVTGTLHDLMLEVVDSGKKSKAKVWVKPWLDFKAVVEFRHVG

SEQ ID NO: 242 - protein, 90 aa, Artificial Sequence
  Synthetically generated peptide
GAPRDVPAGGENSADVEELARFAVAEHNKKENALLEFGRVVKAKEQVVAGTLHHLTVEAIDAGNKKLYEAKVWVKPWLNFKELQEFRHAG

SEQ ID NO: 243 - protein, 90 aa, Artificial Sequence
  Synthetically generated peptide
GGIRDSPAGSENSLETEALGRFAVDDHNQKQNGMLEFVRVVKAKEQVVAGTLHHLVVEAIDGGKKKLYEAKVWVKPWLNFKQVQEFKHAG

SEQ ID NO: 244 - protein, 89 aa, Artificial Sequence
  Synthetically generated peptide
GAVRDNQGVANSVETESLARYAVDEHNKKENDLLEFVRVLDDKVQVVSGTMHYLKIEATEGGKKKVYEAKVWVKPWENFKQVQEFKPVS

SEQ ID NO: 245 - protein, 59 aa, Artificial Sequence
  Synthetically generated peptide
GGITEVKDFANSLVIDDLARFAVDEYSKKQNTLLEFERVLDAKQQIVAGTMYYFIATVG

SEQ ID NO: 246 - protein, 89 aa, Artificial Sequence
  Synthetically generated peptide
GGFTEVKDFANSIVIDDLARFAVDEYNKKQNTLLEFRKVLNAKEQIVSGTLYYITLDAANGGIIKTYEAKVWVKKWENLKELQEFKPVD

SEQ ID NO: 247 - protein, 89 aa, Artificial Sequence
  Synthetically generated peptide
GGITEVKDFANSLEIEDLARFAVDEHNKKQNTLLEFGKVLNAKEQIVAGKLCYITLEATDGGVKKTYEAKVWVKPWENFKELQEFKPVD

SEQ ID NO: 248 - protein, 88 aa, Artificial Sequence
  Synthetically generated peptide
GGITEVKDNDNSVDFDELAKFAIAEHNKKENAALEFGKVIEKKQQAVQGTMYYIKVEANDGGEKKTYEAKVWVKLWENFKELQELKLV

SEQ ID NO: 249 - protein, 78 aa, Artificial Sequence
  Synthetically generated peptide
SLEIDELARFAVDEHNKKQNALLEFGKVVNTKEQVVAGKMYYITLEATNGGVKKTYEAKVWVKPWENFKELQEFKPVD

SEQ ID NO: 250 - protein, 89 aa, Artificial Sequence
  Synthetically generated peptide
GGIKQVEGSANSLEVESLAKFAVEDHNKKQNAMLEFSKVVNTKEQVVAGTMYYITLEATDGGKKKVYEAKVWVKPWMNFKQVQEFKLLG

SEQ ID NO: 251 - protein, 89 aa, Artificial Sequence
  Synthetically generated peptide
GGIREAGGSENSLEINDLARFAVDEHNKKQNALLEFGKVVNVKEQVVAGTMYYITLEATEGGKKKAYEAKVWVKPWQNFKQVEDFKLIG

SEQ ID NO: 252 - protein, 89 aa, Artificial Sequence
  Synthetically generated peptide
GGIHEKEGSANSVEMDELARFAVDQHNKKQNALLEFVKVVNVKEQVVSGTLYYITLEATGGGQKKLYEAKVWVKPWMNFKELQDFQLAS

SEQ ID NO: 253 - protein, 84 aa, Artificial Sequence
  Synthetically generated peptide
GGSSAISLEIDELAKFAVDHYNSIENALLEFPRVVNTKEQVVAGTIYYITLEATDGGVKKLYEANVWVKPGVNFKEVQVFKYVG

SEQ ID NO: 254 - protein, 90 aa, Artificial Sequence
  Synthetically generated peptide
GGIKDSGGSSANSLEIDELAKFAVDHYNSKENALLEFQRVVNTKEQVVAGTIYYITLEATDGGVKKLYEAKVWVKPWVNFKEVQDFKYVG

SEQ ID NO: 255 - protein, 71 aa, Artificial Sequence
  Synthetically generated peptide
GGVSDVKGHENSLQIDDLARFAVDDHNKKANTLLQFKKVVNAKQQVVSGTIYILTLEVEDGGKKKVYEAKI

SEQ ID NO: 256 - protein, 71 aa, Artificial Sequence; identical to SEQ ID NO: 255
  Synthetically generated peptide

SEQ ID NO: 257 - protein, 89 aa, Artificial Sequence
  Synthetically generated peptide
GGVSDVKGHENSLQIDDLARFAVDDHNKKANTLLQFKKVVNAKQQVVSGTIYILTLEVEDGGKKKVYEAKIWEKPWLNFKEVQEFKLIG

SEQ ID NO: 258 - protein, 89 aa, Artificial Sequence
  Synthetically generated peptide
GGLQDVEGDANNLEYQELARFAVDEHNKKTNAMLQFKRVVNVKQAVVEGLKYCITLEAVDGHKTKVYEAEIWLKLWENFRSLEGFKLLG

SEQ ID NO: 259 - protein, 79 aa, Artificial Sequence
  Synthetically generated peptide
ESVEIDSLARFAVEEHNKKQNALLEFGRVVSAQQQVVSGTLYTITLEAKDGGQKKVYEAKVWEKPWLNFKELQEFKLVG

SEQ ID NO: 260 - protein, 89 aa, Artificial Sequence
  Synthetically generated peptide
GGNRDVAGNQNSLEIDSLARFAVEEHNKKQNALLEFGRVVSAQQQVVSGTLYTITLEAKDGGQKKVYEAKVWEKPWLNFKELQEFKHVG

SEQ ID NO: 261 - protein, 77 aa, Artificial Sequence
  Synthetically generated peptide
NSVEIDARFAVEEHNKKQNALLEFEKVVTAKQQVVSGTLYTITLEAKDGGQKKVYEAKVWEKSWLNFKEVQEFKLVG

SEQ ID NO: 262 - protein, 89 aa, Artificial Sequence
  Synthetically generated peptide
GGIKEVEESANSVEIDNLARFAVDDYNKKQNALLEFKRVVSTKQQVVAGTMYYITLEVADGGQTKVYEAKVWEKPWLNFKEVQEFKPIG

SEQ ID NO: 263 - protein, 89 aa, Artificial Sequence
  Synthetically generated peptide
GGVRDVPGNQNSLAIDGLARFAVEEHNKKQNALLEFSRVISAKEQVVAGTIHHITLEVKDGVNKKVYEAKVWEKSWMNFKEVQEFKLVE

SEQ ID NO: 264 - protein, 89 aa, Artificial Sequence
  Synthetically generated peptide
GAPREVAGNENSLEIDSLARFAVDEHNKKQNGLLEFKRVISAKQQVVAGTLHHITLEAASGDSKNVYEAKVWEKPWMNFKEVQEFKLAG

SEQ ID NO: 265 - protein, 89 aa, Artificial Sequence
  Synthetically generated peptide
GGITDVPGAANSVEIANLARFAVDDHNKKQNGVLEFVRVISAKQQVVSGILYYITLEAKDGETKKVYKTKVWVREWLNPKEVQEFNLVT

SEQ ID NO: 266 - protein, 89 aa, Artificial Sequence; identical to SEQ ID NO: 265
  Synthetically generated peptide

SEQ ID NO: 267 - protein, 89 aa, Artificial Sequence
  Synthetically generated peptide
GGIIDVSGSANCLEIAILARFAVDDHNKKQNGVLEFVRVISAKQQVVSGILYYITLEAKDGETKKVYKTKVWVREWLNPKEVQEFNLVT

SEQ ID NO: 268 - protein, 89 aa, Artificial Sequence
  Synthetically generated peptide
GGITDVHGAANSVEINNLARFAVEEQNKRENSVLEFVRVISAKQQVVAGVNYYITLEAKDGLIKNEYEAKVWVREWLNSKELLEFKPVN

SEQ ID NO: 269 - protein, 87 aa, Artificial Sequence
  Synthetically generated peptide
GGVGDVPSDTLHIENLARFAVDQYNKNENANLEFVRVIDAKEQVVEGFIYYITLEAKDGESKNVYEAKVWERSWLNSIELLEFKPVD

SEQ ID NO: 270 - protein, 87 aa, Artificial Sequence; identical to SEQ ID NO: 269
  Synthetically generated peptide

SEQ ID NO: 271 - protein, 89 aa, Artificial Sequence
  Synthetically generated peptide
GGFTDITGAQNSIDIENLARFAVDEHNKKENAVLEFVRVISAKKQVVSGTLYYITLEANDGVTKKVYETKVLEKPWLNIKEVQEFKPIT

SEQ ID NO: 272 - protein, 48 aa, Artificial Sequence
  Synthetically generated peptide
GFTDITGAQNSIDIENLARFAVDEHNKKENAVLEFVRVKSAKKQVVSG

SEQ ID NO: 273 - protein, 86 aa, Artificial Sequence
  Synthetically generated peptide
GGVTECKNFENNVEIETIAKFAVEEHNKKENATLEFVKVVSAKEQVVSGKIYYITIETNDGKTYEAKLWVKPWENFQELQEFKPAA

SEQ ID NO: 274 - protein, 88 aa, Artificial Sequence
  Synthetically generated peptide
GGVRDVPDHNSAETEELARFAVQEHNKKANTRLEFSRVVKAKEQVVAGTMYYITLEVVEAGQKKIYEAKVWVKLWENFKELQEFKPVG

SEQ ID NO: 275 - protein, 57 aa, Artificial Sequence
  Synthetically generated peptide
HLEYVENLNVKEQLVAGTLYYITLVATDAGKKKIYETKIWVKEWEDFKKVVEFKLVG

SEQ ID NO: 276 - protein, 88 aa, Artificial Sequence
  Synthetically generated peptide
GDIVDVPDPNIPPLQDLARFAVQDYNKAQNAHLEYVENLNVKEQLVAGTLYYITLVATDAGKKKIYETKIWVKEWEDFKKVVEFKLVG

SEQ ID NO: 277 - protein, 88 aa, Artificial Sequence
  Synthetically generated peptide
GGFTDVPFPNNPEFQDLARFAVQDYNKKENAHLEYVENLNVKEQLVAGMIYYITLVATDAGKKKIYEAKIWVKEWEDFKKVVEFKLVG

SEQ ID NO: 278 - protein, 88 aa, Artificial Sequence
  Synthetically generated peptide
GGITDVPFPNNPEFQDLARFAIQVYNKKENVHLEFVENLNVKQQVVAGMMYYITLAAIDAGKKKIYETKIWVKEWEDFKKVVEFKLVG

SEQ ID NO: 279 - protein, 89 aa, Artificial Sequence
  Synthetically generated peptide
GGIVNVPNPNNTKFQELARFAIQDYNKKQNAHLEFVENLNVKEQVVAGIMYYITLAATDDAGKKKIYKAKIWVKEWEDFKKVVEFKLVG

SEQ ID NO: 280 - protein, 58 aa, Artificial Sequence
  Synthetically generated peptide
GGIISVPFPNSPEFQDLARFAVQDYNNTQNAHLEFVENLSVKEQLVSGMMYYITLAAT

SEQ ID NO: 281 - protein, 88 aa, Artificial Sequence
  Synthetically generated peptide
GGIINVPNPNSPEFQDLARFAVQDYNNTQNAHLEFVENLNVKEQLVSGMMYYITLAATDAGNKKEYEAKIWVKEWEDFKKVIDFKLVG

SEQ ID NO: 282 - protein, 88 aa, Artificial Sequence
  Synthetically generated peptide
GGIINVPFPNNPEFQDLARFAVQDYNKKENAHLEFVENLNVKEQLVAGMLYYITLVAIDAGKKKIYEAKIWVKEWENFKKVIEFKLIG

SEQ ID NO: 283 - protein, 88 aa, Artificial Sequence
  Synthetically generated peptide
GGITNVPFPNLPEFKDLARFAVQDYNKKENAHLEFVENLNVKEQVVAGIIYYITLVATDAGKKKIYETKILVKGWENFKEVQDFKLVG

SEQ ID NO: 284 - protein, 88 aa, Artificial Sequence
  Synthetically generated peptide
GGITNVPFPNLPQFKDLARFAVQDYNKKENAHLEFVENLNVKEQVVAGIIYYITLVATDAGKKKIYETKILVKGWENFKEVQEFKLVG

SEQ ID NO: 285 - protein, 88 aa, Artificial Sequence
  Synthetically generated peptide
GGIIIVPFPNSPEFQDLARFAVQDFNKKENGHLEFVENLNVKEQVVAGMMYYITLAATDARKKEIYETKILVKEWENFKEVQEFKLVG

SEQ ID NO: 286 - protein, 58 aa, Artificial Sequence
  Synthetically generated peptide
GGLTDVPFPNNPEFQDLARFAVQDYNKKENGHLEFVEVLNVKEQVVAGMMYYITLAAT

SEQ ID NO: 287 - protein, 88 aa, Artificial Sequence
  Synthetically generated peptide
GGFTEVPFPNSPEFQDLTRFAVHQYNKDQNAHLEFVENLNVKKQVVAGMLYYITFAATDGGKKKIYETKIWVKVWENFKKVVEFKLVG

SEQ ID NO: 288 - protein, 57 aa, Artificial Sequence
  Synthetically generated peptide
HLEFVEVLNVKEQVVAGMMYYITLAVTDAGKKKIYEANIWVKEWEHFIKVVEFKPVS

SEQ ID NO: 289 - protein, 59 aa, Artificial Sequence
  Synthetically generated peptide
NAHLEFVEVLNVKEQVVAGMMYYITLVATDDGYKKIYKTKIWVKEWENFKEVQEFKQIV

SEQ ID NO: 290 - protein, 88 aa, Artificial Sequence
  Synthetically generated peptide
GGLVDVPFENKVEFDDLARFAVQDYNQKNDSSLEFKKVLNVKQQIVAGIMYYITFEATEGGNKKEYEAKILLRKWEDLKKVVGFKLVG

SEQ ID NO: 291 - protein, 35 aa, Artificial Sequence
  Synthetically generated peptide
RKSLEHFNEIHSTKYEFVRFIKANHQVSAGMMYFI

SEQ ID NO: 292 - protein, 61 aa, Artificial Sequence
  Synthetically generated peptide
GGWNPIPDVSDSHIQELGGWALGQAKHQKLAADGLRFRRVVRGEQQVVSGMNYRLYVDAAD

SEQ ID NO: 293 - protein, 61 aa, Artificial Sequence; identical to SEQ ID NO: 292
  Synthetically generated peptide

SEQ ID NO: 294 - protein, 64 aa, Artificial Sequence
  Synthetically generated peptide
GGWSPIRNVSDPHIQELGGWAVTEHVRRANDGLRFGEVTGGEEQVVSGMNYKLVLDATDADGKV

SEQ ID NO: 295 - protein, 59 aa, Artificial Sequence
  Synthetically generated peptide
GGWKPIKNVNDPHVREIGRWAVSEHIKTANDGLGFGRVVSGEEQIVAGKNYRLRIQATK

SEQ ID NO: 296 - protein, 59 aa, Artificial Sequence
  Synthetically generated peptide
GGWKPIKNVNDPHVQEIGRWAVSEHIKTANDGLGFGRVVSGEEQIVAGKNYRLRIQATK

SEQ ID NO: 297 - protein, 58 aa, Artificial Sequence
  Synthetically generated peptide
GWEPIGNINDQHIQELGRWAVLEFGKHVNCVLKFNKVVSGRQQLVSGMNYELIIEASD

SEQ ID NO: 298 - protein, 64 aa, Artificial Sequence
  Synthetically generated peptide
GGWSPISDAKDPHVVEIGVFAVSEYDKQSKSGLKFVTVVSGESQVAAGTNYRLIVTVDGSIGVA

SEQ ID NO: 299 - protein, 92 aa, Artificial Sequence
  Synthetically generated peptide
GRWSPISNVKDPHVVEVGKFAVSEYDMESKSELKFVVVVSGESKVVAGTNYRLIVAVNDGVAGPGASKNYEAIVWEKQWLKSMNLTSFKPVV

SEQ ID NO: 300 - protein, 94 aa, Artificial Sequence
  Synthetically generated peptide
GGWRPLSDVNDPHVVEIGKFSVSEYNKQSKAGLKFVAVVSGESQVVAGMNYRLIVAVNDGVETAGAGASKNYEAIVWERAWLKSMNLTSFKPAI

SEQ ID NO: 301 - protein, 89 aa, Artificial Sequence
  Synthetically generated peptide
GGWSPISNVTDPQVVEIGEFAVSEYNKRSESGLKFETVVSGETQVVSGTNYRLKVAANDGDGVSKNYLAIVWDKPWMKFRNLTSFEPAN

SEQ ID NO: 302 - protein, 89 aa, Artificial Sequence; identical to SEQ ID NO: 301
  Synthetically generated peptide

SEQ ID NO: 303 - protein, 89 aa, Artificial Sequence
  Synthetically generated peptide
GGWSPISNVTDPQVVEIGEFAVSEYNKRSESGLKFETVVSGETQVVSGTNYRLKVAANDGDGVSKNYLAIVWVKPWMKFRNLTSFEPAN

SEQ ID NO: 304 - protein, 88 aa, Artificial Sequence
  Synthetically generated peptide
GGWKPIEDPKEKHVMEIGQFAVTEYNKQSKSALKFESVEKGETQVVSGTNYRLILVVKDGPSTKKFEAVVWEKPWEHFKSLTSFKPMV

SEQ ID NO: 305 - protein, 86 aa, Artificial Sequence
  Synthetically generated peptide
GSRKPIKNVSDPDVVAVAKYAIEEHNKESKENLVFVKVVEGTTQVVSGTKYDLKIAAKDGGGKIKNYEAVVVEKLWLHSKSLESFK

SEQ ID NO: 306 - protein, 86 aa, Artificial Sequence
  Synthetically generated peptide
GSRKPIKNVSDPDVVAVAKYAIEEHNKESKEKLVFVKVVEGTTQVVSGTKYDLKIAAKDGGGKIKNYEAVVVEKLWLHSKSLESFK

SEQ ID NO: 307 - protein, 56 aa, Artificial Sequence
  Synthetically generated peptide
GQYVKIENVKDPYVQGVGEWAVKEHNRQTGESLQFAEVVSGMEQVVAGTNYKLNLA

SEQ ID NO: 308 - protein, 60 aa, Artificial Sequence
  Synthetically generated peptide
GGWRPIESLNSAEVQDVAQFAVSEHNKQANDELQYQSVVRGYTQVVAGTNYRLVIAAKDG

SEQ ID NO: 309 - protein, 60 aa, Artificial Sequence
  Synthetically generated peptide
GGWRPIENLNSAEVQDVAQFAVSEHNKQANDELQYQSVVRGYTQVVSGTNYRLVIAAKDG

SEQ ID NO: 310 - protein, 60 aa, Artificial Sequence
  Synthetically generated peptide
GGWRPIKDLNSAEVQDVAQFAVSEHNKQANDKLQYQRVVRGYSQVVAGTNYRLVIAAKDG

SEQ ID NO: 311 - protein, 43 aa, Artificial Sequence
  Synthetically generated peptide
PGWQSVPAHDPQVQDAANHAIKTIQQRSNSLVPYELHEVTDAK

SEQ ID NO: 312 - protein, 43 aa, Artificial Sequence; identical to SEQ ID NO: 311
  Synthetically generated peptide

SEQ ID NO: 313 - protein, 43 aa, Artificial Sequence
  Synthetically generated peptide
PGWQSVPPHDPQVQDAANHAVKSLQQRSNSLLPYELQEVVHAQ

SEQ ID NO: 314 - protein, 46 aa, Artificial Sequence
  Synthetically generated peptide
PGWQDVHPQDPQVQDAANHAVKSLQQKSNSLFPYELQEVVHAKSEV

SEQ ID NO: 315 - protein, 47 aa, Artificial Sequence
  Synthetically generated peptide
PGWRDVPVHDPVVKDAASHAVKSIQQRSNSLLPYELVEIVRAKAEVV

SEQ ID NO: 316 - protein, 47 aa, Artificial Sequence
  Synthetically generated peptide
PGWRDVPVHDPVVKDAADHAVKSIQQRSNSLFPYELLEIVRAKAEVV

SEQ ID NO: 317 - protein, 47 aa, Artificial Sequence
  Synthetically generated peptide
PGWREVPVEDPVVKDAAHHAVKSIQERSNSLFPYELLEILRAHAQVV

SEQ ID NO: 318 - protein, 47 aa, Artificial Sequence; identical to SEQ ID NO: 317
  Synthetically generated peptide

SEQ ID NO: 319 - protein, 89 aa, Artificial Sequence
  Synthetically generated peptide
SGWREVPGDDPEVKHVAEQAVKTIQQRSNSLFPYELLEVVHAKAEVTGEAAKYNMLLKLKRGEKEEKFKVEVHKNHEGALHVNHAEQHH

SEQ ID NO: 320 - protein, 71 aa, Artificial Sequence
  Synthetically generated peptide
SGWREVPGDDPEVKHVAEQAVKTIQQRSNSLFPYELLEVVHAKAEVTGEAAKYNMLLKLKRGEKEEKFKVE

SEQ ID NO: 321 - protein, 71 aa, Artificial Sequence; identical to SEQ ID NO: 320
  Synthetically generated peptide

SEQ ID NO: 322 - protein, 71 aa, Artificial Sequence
  Synthetically generated peptide
SGWREVPGDDPEVKHAAEQAVKTIQQRSNSLFPYELLEVVHAKAEVTGEAAKYNMLLKLKRGEKEEKFKVE

SEQ ID NO: 323 - protein, 89 aa, Artificial Sequence
  Synthetically generated peptide
SGWREVPGDDPEVQHVADHAVKSIQQRSNSLFPYELQEVVHANAEVTGEAAKYNMVLKLKRGEKEEKFKVEVHKNHEGVLHLNHMEQQH

SEQ ID NO: 324 - protein, 89 aa, Artificial Sequence
  Synthetically generated peptide
SGWREVPGDDPEVQHVADHAVKTIQQRSNSLFPYELQEVVHANAEVTGEAAKYNMVLKLKRGEKEEKFKVEVHKNHEGVLHLNHMEQQH

SEQ ID NO: 325 - protein, 89 aa, Artificial Sequence
  Synthetically generated peptide
SGWREVPGDDPEVQHVADHAVKTIQQRSNSLFPYELQEVVHANAEVTGEAAKYNMVLKLKRGEKEEKFKVEVHKNHEGVLHLNHMEQHH

SEQ ID NO: 326 - protein, 89 aa, Artificial Sequence
  Synthetically generated peptide
SGWREVPGDDPEVQHVAEHAVKTIQQRSNSLFPYELQEVVHANAEVTGETAKFNMLLKLKRGEKEEKFKVEVHKNHEGALHLNHMEQHH

SEQ ID NO: 327 - protein, 47 aa, Artificial Sequence
  Synthetically generated peptide
SGWRPVPVHDPVVQDAAHHAIKTIQERSNSLFPYELSEVVHANAEVV

SEQ ID NO: 328 - protein, 47 aa, Artificial Sequence
  Synthetically generated peptide
AEWKEVAAHDPVVQDAATHAVNTIQQRSNSLFPYQLQEIVHAKAQVV

SEQ ID NO: 329 - protein, 63 aa, Artificial Sequence
  Synthetically generated peptide
FDWRSVSTNNPEVQEAAKHAMKSLQQKSNSLFPYKLIDIILARAKVVEERVKFELLLKLERGN

SEQ ID NO: 330 - protein, 63 aa, Artificial Sequence; identical to SEQ ID NO: 329
  Synthetically generated peptide

SEQ ID NO: 331 - protein, 78 aa, Artificial Sequence
  Synthetically generated peptide
LYVQVIQAINNSVVNPSARICCPVVEITLGNYKSSTKNLPMGPNMDWNQVFAFDKSKGDVLSVTLKDGPTNTVINKRN

SEQ ID NO: 332 - protein, 66 aa, Artificial Sequence
  Synthetically generated peptide
LYVDVIRAIKNSDVDPGPCDPVVEITLGNYKSSTKDLPVGPNMDWNQVFAFDKTKGDVLSVTLKDR

SEQ ID NO: 333 - protein, 67 aa, Artificial Sequence
  Synthetically generated peptide
LYVRVVRRVAAVGETVAEVKLGNYRGVTPATAAHHWDQVFAFSKETIQSSFVEVFVRRSDDHVGRVW

SEQ ID NO: 334 - protein, 75 aa, Artificial Sequence
  Synthetically generated peptide
LYVNIVKAKDLSVLGEVVSEVKLGNYRGVTKKVSSNSSNPEWNQVFVFSKERIQSSVVELFVKEGNKDEYTGRVL

SEQ ID NO: 335 - protein, 74 aa, Artificial Sequence
  Synthetically generated peptide
LYVRVVKRLKWSGEFDPFAELRLGGYSCITRHVEKTDEWDDVFAFSRERIHAPFLDVLVRGRGFAKDDYVGSTR

SEQ ID NO: 336 - protein, 87 aa, Artificial Sequence
  Synthetically generated peptide
LYVRVVRRLTAAASTVAGGGGCNPYVEVRLGNYRGTTRHHERKAAPEWNQVFAFSRERVQASVLEVFVRDKDAVAAVARDGYVGRVA

SEQ ID NO: 337 - protein, 81 aa, Artificial Sequence
  Synthetically generated peptide
LYVRVVKARELPIMDITGSVDPFVEVRVGNYKGITRHFEKRQHPEWNQVFAFAKERMQASVLEVVVKDKDLLKDDYVGFVR

SEQ ID NO: 338 - protein, 79 aa, Artificial Sequence
  Synthetically generated peptide
LFVRVVKARDLPDMDVTGSLDPYVEVRVGNYRGITRHFEKQKNPEWNAVFAFSRDRMQATIVVVKDKDLLKDDFVGLVR

SEQ ID NO: 339 - protein, 79 aa, Artificial Sequence; identical to SEQ ID NO: 338
  Synthetically generated peptide

SEQ ID NO: 340 - protein, 81 aa, Artificial Sequence
  Synthetically generated peptide
LFVRVVKARDLPHMDITGSLDPYVEVHLGNYKMKTRHFEKNQRPEWDEVFAFPREVMQSTSLEVIVKDKDFIRDDYVGRVS

SEQ ID NO: 341 - protein, 81 aa, Artificial Sequence
  Synthetically generated peptide
LYVRVVKARDLPNKDLTGSLDPYVVVKIGNFKGVTTHFNKNTDPEWNQVFAFAKDNLQSNFLEVMVKDKDILLDDFVGIVK

SEQ ID NO: 342 - protein, 81 aa, Artificial Sequence; identical to SEQ ID NO: 341
  Synthetically generated peptide

SEQ ID NO: 343 - protein, 81 aa, Artificial Sequence
  Synthetically generated peptide
LFIRVVKARDLPRMDLTGSLDPYVIVKVGNFKGTTNHFEKNNSPEWNLVFAFAKENQQATTLEVVIKDKDTIHDDFVGTVR

SEQ ID NO: 344 - protein, 82 aa, Artificial Sequence
  Synthetically generated peptide
LYVSVVKARDLPVMDVSGSLDPYVEVKLGNYKGLTKHLEKNSNPIWKQIFAFSKERLQSNLLEVTVKDKDLLTKDDFVGRVH

SEQ ID NO: 345 - protein, 82 aa, Artificial Sequence; identical to SEQ ID NO: 344
  Synthetically generated peptide

SEQ ID NO: 346 - protein, 81 aa, Artificial Sequence
  Synthetically generated peptide
LYVSVVKARDLPNMDITGALDPYVEVRLGNFKGVTRHLEKNPNPVWRQVFAFSRDHLQSSQLEVVVKDKDVLKDDFVGRVV

SEQ ID NO: 347 - protein, 81 aa, Artificial Sequence
  Synthetically generated peptide
LFIKIVKARNLPSMDLTGSLDPYIEVKLGNYTGKTKHFEKNQNPVWNEVFAFSKSNQQSNVLEVIVMDKDMVKDDFVGLIR

SEQ ID NO: 348 - protein, 82 aa, Artificial Sequence
  Synthetically generated peptide
LYVRVVKAKDLPPGTITSSCDPYVEVKLGNYRGRTKHLEKKLNPEWNQVFAFSKDRIQSSVLEVFVKDKEMVGRDDYLGRVI

SEQ ID NO: 349 - protein, 80 aa, Artificial Sequence
  Synthetically generated peptide
LYVRVVKAKNLTLNSLTSTCDPYVEVRLGNYKGRTKHLDKRSNPEWNQVYAFSKDQIQSSIVIVKDKETVGRDDYIGRVA

SEQ ID NO: 350 - protein, 82 aa, Artificial Sequence
  Synthetically generated peptide
LYVRVVKAKDLPPNPVTSNCDPYVEVKIGNYKGKTKHFEKRTNPEWNQVFAFSKDKVQSSTVEVFVRDKEMVTRDEYIGKVV

SEQ ID NO: 351 - protein, 83 aa, Artificial Sequence
  Synthetically generated peptide
LYVRVVKAKELPPGSITGGCDPYVEVKLGNYKGRTKIFDRKTTIPEWNQVFAFTKERIQSSVLEVFVKDKETLGRDDILGKVV

SEQ ID NO: 352 - protein, 81 aa, Artificial Sequence
  Synthetically generated peptide
LYVRVVKAKELPGKDMTGSCDPYVEVKLGNYKGTTRHFEKKSNPEWNQVFAFSKDRIQASFLEATVKDKDFVKDDLIGRVV

SEQ ID NO: 353 - protein, 81 aa, Artificial Sequence; identical to SEQ ID NO: 352
  Synthetically generated peptide

SEQ ID NO: 354 - protein, 81 aa, Artificial Sequence
  Synthetically generated peptide
LYVRVVKAKELPGKDLTGSCDPYVEVKLGNYRGTTRHFEKKSNPEWNQVFAFSKDRVQASYLEATVKDKDLVKDDLIGRVV

SEQ ID NO: 355 - protein, 79 aa, Artificial Sequence
  Synthetically generated peptide
LYVRVVKAKELPGKDVTGSCDPYVEVKLGNYRGMTKHFEKRSNPEWKQVFAFSKERIQASIVVVKDKDVVLDDLIGRIM

SEQ ID NO: 356 - protein, 81 aa, Artificial Sequence
  Synthetically generated peptide
LYVRVVKAKDLPSKDITGSCDPYVEVKLGNYKGTTRHFEKKTNPEWNQVFAFSKERIQSSVVEIIVKDKDFVKDDFIGRVL

SEQ ID NO: 357 - protein, 82 aa, Artificial Sequence
  Synthetically generated peptide
LYVHVVKAKDLPAVSAAGTIDPFVEVKLGNFKGTTPVLGGNHNPSWKQVFAFSATHLQAHVLEVAVKAKDLAGGDDLIGRVG

SEQ ID NO: 358 - protein, 73 aa, Artificial Sequence
  Synthetically generated peptide
LYIRIVKARALPSNDLFVEVTIGRYKGRTKRSTNPYPNLEFDEVFAFNSDRLQGNMLEVTMKMNEEEIIGQCR

SEQ ID NO: 359 - protein, 73 aa, Artificial Sequence; identical to SEQ ID NO: 358
  Synthetically generated peptide

SEQ ID NO: 360 - protein, 75 aa, Artificial Sequence
  Synthetically generated peptide
LYARIVRARALPVNDSFVAVKIGSYKGRTKQILNSNPNPEFHETFAFTKTRLQGDIVVVRNRDNPNEDDIVGKCK

SEQ ID NO: 361 - protein, 84 aa, Artificial Sequence
  Synthetically generated peptide
LFVRVIKARKLPDMDANGSLDPYVEVKFGAYNRGVTRCFKRNKNPEWNETFAFSFQHDKIPSPTVDIVVNDKDLVRDDFVGKLH

SEQ ID NO: 362 - protein, 81 aa, Artificial Sequence
  Synthetically generated peptide
LFVRIVKRLPPNESAYVKVRTSNHFVRSKPAVNRPGESVDSPEWNQVFALGHNRSDSAVTGATLEISAWDASSESFLGGVC

SEQ ID NO: 363 - protein, 81 aa, Artificial Sequence; identical to SEQ ID NO: 362
  Synthetically generated peptide

SEQ ID NO: 364 - protein, 80 aa, Artificial Sequence
  Synthetically generated peptide
LFVRVVKVRGIRACEGPYVKIQAGPHTLRSRPGRDVSGTGNPEWNQVFAINHAKPEPTLEISVWDGGAPSPIEAFLGGVC

SEQ ID NO: 365 - protein, 85 aa, Artificial Sequence
  Synthetically generated peptide
LFVRVVRRLPAGAHPHVRVAAGGRHASTREARRGAFFEWDQTFAFVRDPGATDSPGPTLEVSVWDLPPDADVSDADDRHFLGGLC

SEQ ID NO: 366 - protein, 79 aa, Artificial Sequence
  Synthetically generated peptide
VFIRVVKARSLPTSGSPVTKISLSGTMIQSKPARKTSCFEWDQTFAFLRDSPDLSSSPIISVWDSSTGIETSQFLGGIC

SEQ ID NO: 367 - protein, 89 aa, Artificial Sequence
  Synthetically generated peptide
LEVHLVDAKGLTGNDFLGEIGKIDPYVVVQYRSQERKSSVARDQGKNPSWNEVFKFQINSTAATGQHKLFLRLMDHDTFSRDDFLGEAT

SEQ ID NO: 368 - protein, 63 aa, Artificial Sequence
  Synthetically generated peptide
MDPYVILTCRTQEQKSSVAKGAGSEPEWNETFVFTVSDDVPQLNVKIMDSDAFSADDFVGEAN

SEQ ID NO: 369 - protein, 82 aa, Artificial Sequence
  Synthetically generated peptide
LEVLLVCAKGLEDTDFLNDMDPYVILTCRTQEQKSSVAKGAGSEPEWNETFVFTVSDDVPQLNVKIMDSDAFSADDFVGEAN

SEQ ID NO: 370 - protein, 81 aa, Artificial Sequence
  Synthetically generated peptide
LEVLLVSAKGLEDTDFLNNMDPFVILTCRTQEQKSSVANGAGSEPEWNETFVFTVSDDTPQLHLKIMDSDLTNDDFVGERT

SEQ ID NO: 371 - protein, 81 aa, Artificial Sequence
  Synthetically generated peptide
LEVLLVSAKGLEDTDFLNNMDPFVILTCRTQEQKSSVANGAGSEPEWNETFVFTVSDDTPQLHLKIMDSDLTNDDFVGEAT

SEQ ID NO: 372 - protein, 82 aa, Artificial Sequence
  Synthetically generated peptide
LEVVLVSAKGLEDADFLNNMDPYVQLTCRTQDQKSNVAEGMGTTPEWNETFIFTVSEGTTELKAKIFDKDVGTEDDAVGEAT

SEQ ID NO: 373 - protein, 82 aa, Artificial Sequence
  Synthetically generated peptide
LEVLLVGAKGLENTDYLCNMDPYAVLKCRSQEQKSSVASGKGSDPEWNETFMFSVTHNATELIIKLMDSDSGTDDDFVGEAT

SEQ ID NO: 374 - protein, 82 aa, Artificial Sequence; identical to SEQ ID NO: 373
  Synthetically generated peptide

SEQ ID NO: 375 - protein, 82 aa, Artificial Sequence
  Synthetically generated peptide
LEVLLVGAKGLENTDYLCNMDPYAILKCRSQEQRSSIASGKGSNPEWNENFVFTVSDKATELLIKLLDSDTGSADDFVGEAT

SEQ ID NO: 376 - protein, 82 aa, Artificial Sequence
  Synthetically generated peptide
LEVVLISAKGLEDNDFLSSIDPYVILSYRAQEHKSTVQEGAGSNPQWNETFLFTVSDSASELNLRIMEKDNFNNDDNLGEAI

SEQ ID NO: 377 - protein, 87 aa, Artificial Sequence
  Synthetically generated peptide
MEVHLISGKGLQAHDPLNKPIDPYAEINFKGQERMSKVAKNAGPNPLWDEKFKFLAEYPGSGGDFHILFKVMDHDAIDGDDYIGDVK

SEQ ID NO: 378 - protein, 87 aa, Artificial Sequence
  Synthetically generated peptide
MEVHLISGKGLQAHDPLNKPIDPYAEINFKGQERMSKVAKNAGPDPIWNEKFKFLVEYPGSGGDFHILFKVMDHDAIDGDDYIGDVK

SEQ ID NO: 379 - protein, 87 aa, Artificial Sequence
  Synthetically generated peptide
MEVHLISGKGLQALDPLNKPIDPYAEINFKGQERMSKVAKNAGPDPIWNEKFKFLVEYPGSGGDFHILFKVMDHDAIDGDDYIGDVI

SEQ ID NO: 380 - protein, 87 aa, Artificial Sequence
  Synthetically generated peptide
LEVHLISGKGLQAHDPLNKPIDPYVEINYKGQERMSKVAKNAGPDPLWDEKFKFLAEYPGSGGDFHVLFKVMDHDAIDGDDYIGDVK

SEQ ID NO: 381 - protein, 87 aa, Artificial Sequence
  Synthetically generated peptide
LEVHLISGKGLQAHDPLNKPIDPYVEINYKGQERMSKVAKNAGPDPLWDEKFKFLAEYPGSGGDFHILFKVMDHDVIDGDDYIGDVK

SEQ ID NO: 382 - protein, 87 aa, Artificial Sequence
  Synthetically generated peptide
LEVHLISGKGLQAHDPLNKPIDPYAEINYKGQERMSKVAKNAGPDPLWDEKFKFLAEYPGSGGDFHIFFKVMDHDAIDDDDLIGEVK

SEQ ID NO: 383 - protein, 87 aa, Artificial Sequence
  Synthetically generated peptide
LEVHLISGKGLQAHDPLNKPIDPYVEINYKGQERMSKVAKNAGPDPVWNEKFKFLAEYPGSGGDFLILFKVMDHDVIDGDDYIGDVS

SEQ ID NO: 384 - protein, 87 aa, Artificial Sequence
  Synthetically generated peptide
LEVHLISGKGLRAHDPLNKPIDPYVEINYKGQERMSKVAKNAGPDPVWNEKFKFLAEYPGSGGDFLILFKVMDHDVIDGDDYIGDVS

SEQ ID NO: 385 - protein, 87 aa, Artificial Sequence
  Synthetically generated peptide
LEVSLISGKGLKRSDFLGKIDPYVEIQYKGQTRKSSVAKEDGGRNPTWNDKLKWRAEFPGSGADYKLIVKVMDHDTFSSDDFIGEAT

SEQ ID NO: 386 - protein, 77 aa, Artificial Sequence
  Synthetically generated peptide
VGCQKLKDTEWFSRQDPYVVLEYGGRSHRTRTCTDGGKNAVFQEKFIFTLIEGLRDLKVAVWNSNTLSTDDFIGNAT

SEQ ID NO: 387 - protein, 82 aa, Artificial Sequence
  Synthetically generated peptide
LEVTVVGCQKLKDTEWFSRQDPYVVLEYGGRSHRTRTCTDGGKNAVFQEKFIFTLIEGLRDLKVAVWNSNTLSTDDFIGNAT

SEQ ID NO: 388 - protein, 80 aa, Artificial Sequence
  Synthetically generated peptide
VDCTLVSRIKDVEIVGKQSPYAVLTVGPKTFKSGTANGGGSDPVWNQTFSFTNVTPDSSVKLEIFNSNVVLRDVAIGGCK

SEQ ID NO: 389 - protein, 104 aa, Artificial Sequence
  Synthetically generated peptide
LRASVIEAHDLRVPAPSPGLPFDVRVKIKIGFQSARTQRSVASTSSGSAFAWEWEEDLMFVVSEPLDESLIVLVKDRTMIKEPARRGARPTSALLPAKEAAHVC

SEQ ID NO: 390 - protein, 88 aa, Artificial Sequence
  Synthetically generated peptide
LRASVIEAQDLRVPAPPPGLPFDVRVKIQVGFQSARTRRSVASRSSGSAFAWEEDLMFVVSEPLDESLVVLVEDRSMIKEPALLGHAT

SEQ ID NO: 391 - protein, 87 aa, Artificial Sequence
  Synthetically generated peptide
LRVTVLEAQDLHIAPNLPPLTAPEIRVKAQLGFQSARTRRGSMNNHSGSFHWHEDMIFVAGEPLEDCLVLMVEDRTTKEATLLGHAM

SEQ ID NO: 392 - protein, 87 aa, Artificial Sequence; identical to SEQ ID NO: 391
  Synthetically generated peptide

SEQ ID NO: 393 - protein, 83 aa, Artificial Sequence
  Synthetically generated peptide
LRVNVIEAQDLVLLHPNRINPEILIKGFLGNVVVRSRISQTKSVSPVWNEDMMFVAVEPFDDSLILSVEDKVGPREECLGRCE

SEQ ID NO: 394 - protein, 92 aa, Artificial Sequence
  Synthetically generated peptide
LRLSVIQAQDLRLPAPPDAKAKPMGPAFPELYVKAQLGAQVFKTCRVGSAATGTSNPSWNEDLLFVAAEPFDPFLTVVVEDIFSGQPVGQAR

SEQ ID NO: 395 - protein, 93 aa, Artificial Sequence
  Synthetically generated peptide
LRLTVIQTQDLQLGLGSEAKSKIPTTELYVKAQLGPQVFKTARTSIGPSASSSGSGNPTWNEDLVFVASEPFEPFLIVTVEDITNGQSIGQTK

SEQ ID NO: 396 - protein, 84 aa, Artificial Sequence
  Synthetically generated peptide
LRATVIEAQDLLPPQLTAFKEASFQLKAQLGSQVQKTKSAVTRNGAPSWNEDLLFVAAEPFSDQLVFTLEYRTSKGPVTVGMAR

SEQ ID NO: 397 - protein, 76 aa, Artificial Sequence
  Synthetically generated peptide
LRISVLEAQDVVPGAVAGAGGDKGRHGEAFVVVKVQVGGVTLRTKPCCRPTSPSWNEELVFVVAEPFDEPAVLVIE

SEQ ID NO: 398 - protein, 96 aa, Artificial Sequence
  Synthetically generated peptide
LRISVIEAQDVAIMDKGSSLMRFPELSAKLQVGSQILRTAIASAIPTKSFSNPYWNEDLMFVVAEPFEDCVTVVVEDRLNGGAIGGQNDVAVGRVQ

SEQ ID NO: 399 - protein, 80 aa, Artificial Sequence
  Synthetically generated peptide
VRVNVIGAQDIFPMENHIPDVFVKVRLGHQMLKWARSPTRNFMWNEEMMFVAAEPFEEDLIIQIEDRVAQNKDEVIGETM

SEQ ID NO: 400 - protein, 81 aa, Artificial Sequence
  Synthetically generated peptide
LRVNVIEAQDLVIVPDRTRLPNPYVKIRLNNQVVRTKPSHSLNPRWNEEFTLVAAEPFEDLIISIEDRVAPNREETLGEVH

SEQ ID NO: 401 - protein, 72 aa, Artificial Sequence
  Synthetically generated peptide
LRVKVIEAHDLVSHDNKSRAPDAFVKVQHGNQIFKTKPVQSRINNPRWDQGTLFVAAEPFEEPLIITVEDKD

SEQ ID NO: 402 - protein, 83 aa, Artificial Sequence
  Synthetically generated peptide
LRVNVIEAQDVISSDRNRVPEVFIKAQMGSQVLRTKVCPTRSTTQIWNEDLVFVAAEPFEEQLTITVEDRVHGSKDEVLGKIM

SEQ ID NO: 403 - protein, 83 aa, Artificial Sequence
  Synthetically generated peptide
LRVNVIEAQDVIPSDRNRLPEVSVKAHLGCQVLKTKICSTRTTSPLWNEDLVFVAAEPFEEQLTITVEDHVQPSKDEVLGRIS

SEQ ID NO: 404 - protein, 83 aa, Artificial Sequence
  Synthetically generated peptide
LRVNVIEAQDMIPSDRNRLPDVFVKASVGMQTLKTSICSIKTTNPLWKEDLVFVVAEPFEEQLVISVEDRVHTSKDEVIGKIT

SEQ ID NO: 405 - protein, 83 aa, Artificial Sequence
  Synthetically generated peptide
LRVNVIEAQDVEPSDRSQPPQAFVKVQVGNQILKTKLCPNKTTNPMWNEDLVFVAAEPFEEQFFLTVENKVTPAKDEVMGRLI

SEQ ID NO: 406 - protein, 83 aa, Artificial Sequence; identical to SEQ ID NO: 405
  Synthetically generated peptide

SEQ ID NO: 407 - protein, 81 aa, Artificial Sequence
  Synthetically generated peptide
LRVNVIEAQDVQPQRRAPEVFVKAQVGNQILKTSVVAAPTLNPRWNEDLVFVVAEPFEEQLLLTVEDRVTPRKDDLLGRAA

SEQ ID NO: 408 - protein, 83 aa, Artificial Sequence
  Synthetically generated peptide
LRVNIIEAQDIAITDKTRYPDVFVRAQVGHQHGRTKPVQARNFNPFWNEDLMFVAAEPFEDHLILSLEDRVAPNKDEVLGRVI

SEQ ID NO: 409 - protein, 83 aa, Artificial Sequence; identical to SEQ ID NO: 408
  Synthetically generated peptide

SEQ ID NO: 410 - protein, 83 aa, Artificial Sequence
  Synthetically generated peptide
LRVNVIEAQDLIPTDKQRYPEVYVKAIVGNQALRTRVSQSRTINPMWNEDLMFVAAEPFEEPLILSVEDRVAPNKDEVLGRCA

SEQ ID NO: 411 - protein, 83 aa, Artificial Sequence; identical to SEQ ID NO: 410
  Synthetically generated peptide

SEQ ID NO: 412 - protein, 83 aa, Artificial Sequence
  Synthetically generated peptide
LRVNVIEAQDLIPSDKGRYPEVFVKVIMGNQALRTRVSQSRSINPMWNEDLMFVVAEPFEEPLILSVEDRVAPNKDEVLGRCA

SEQ ID NO: 413 - protein, 83 aa, Artificial Sequence
  Synthetically generated peptide
VRVNVIEAQDLIPHDKTKFPEVYVKAMLGNQTLRTRISQTKTLNPMWNEDLMFVVAEPFEEALILAVEDRVAPNKDETLGRCA

SEQ ID NO: 414 - protein, 83 aa, Artificial Sequence
  Synthetically generated peptide
LRVNVIEAQDLIPNDRTRFPDVYVKAMLGNQALRTRVSPSRTLNPMWNEDLMFVAAEPFEEHLILSVEDRIAPGKDDVLGRTI

SEQ ID NO: 415 - protein, 81 aa, Artificial Sequence
  Synthetically generated peptide
VRVNVIEAQDLIPTDKTRFPDVYVKAQLGNQVMKWCQARTLGAVWNEDFLFVVAEPFEDHLVLTVEDRVAPGKDEIVGRTY

SEQ ID NO: 416 - protein, 81 aa, Artificial Sequence; identical to SEQ ID NO: 415
  Synthetically generated peptide

SEQ ID NO: 417 - protein, 90 aa, Artificial Sequence
  Synthetically generated peptide
LRVSVIEAQDLIPMDKGPMAIGRYPELFVRAQVGSQMLRWAPVAANRGPSSPFWNEDLMFVVAEPFEEFLVLSLEDHVSPGRDDVLGRLV

SEQ ID NO: 418 - protein, 68 aa, Artificial Sequence
  Synthetically generated peptide
DKSRVPEVFVRVKVGNQMLRTKFPQRSNNPKWGDEFTFVVAEPFEDNLVLSVEDHTAPNRDEPVGKAV

SEQ ID NO: 419 - protein, 81 aa, Artificial Sequence
  Synthetically generated peptide
LRVQIAQDVIIVSDKSRVPEVFVRVKVGNQMLRTKFPQRSNNPKWGDEFTFVVAEPFEDNLVLSVEDHTAPNRDEPVGKAV

SEQ ID NO: 420 - protein, 83 aa, Artificial Sequence
  Synthetically generated peptide
LRIHVMEAQDLVPSDKGRVPDAIVKIQAGNQMRATRTPQMRTMNPQWHEELMFVVSEPFEDMVIVSVDDRIGPGKDEILGRVF

SEQ ID NO: 421 - protein, 83 aa, Artificial Sequence; identical to SEQ ID NO: 420
  Synthetically generated peptide

SEQ ID NO: 422 - protein, 82 aa, Artificial Sequence
  Synthetically generated peptide
LKVVAIAAQDLIPAEKGRPLAPSIVKIQLGGQTRRTRSQGSANPMWNEEFLFVAAEPFDEPLVVTVEERVAAGRDEPVGRVI

SEQ ID NO: 423 - protein, 82 aa, Artificial Sequence
  Synthetically generated peptide
LRVAAIGAQDLVPLDASRPANFCVKLQLAGQVRRWGAPPGTLNPIWNEEFMFVVSEPFDEPLFVTVEDRVGPGRDEPLGRIM

SEQ ID NO: 424 - protein, 82 aa, Artificial Sequence
  Synthetically generated peptide
VRVTIVSGHDLISTDRNRTPSVYVTATLGQVTLKTEVSSGTNPSWNKDLIFVASEPLEGTVYIRLIDRVDDQHEERIIGKLE

SEQ ID NO: 425 - protein, 79 aa, Artificial Sequence
  Synthetically generated peptide
VRVTIVSGHDLISKDKNKTPSVYVTATLGKVKTKVSSGTNPSWNQDLIFVASEPLEGTVYIRLIDREDEQHEGCIGTLK

SEQ ID NO: 426 - protein, 79 aa, Artificial Sequence
  Synthetically generated peptide
IIVTVLAGKNLVSKDKSGKCDASVKLQYGKIIQKTKIVNAAECVWNQKFEFEELAGEEYLKVKCYREEMLGTDNIGTAT

SEQ ID NO: 427 - protein, 79 aa, Artificial Sequence; identical to SEQ ID NO: 426
  Synthetically generated peptide

SEQ ID NO: 428 - protein, 100 aa, Artificial Sequence
  Synthetically generated peptide
IYVTVVSGNNLNRRILRGSPSKSSEIGEGSSGNSSSKPVQTFVEVELEQLSRRTEMKSGPNPAYQSTFNMILHDNTGTLKFNLYENNPGSVRYDSLASCE

SEQ ID NO: 429 - protein, 100 aa, Artificial Sequence; identical to SEQ ID NO: 428
  Synthetically generated peptide

SEQ ID NO: 430 - protein, 80 aa, Artificial Sequence
  Synthetically generated peptide
VKLEIGSDMKPSDMNGLSDPYVKGRLGPFKFQTQIQKKTLSPKWFEEFKIPITSWESLNELAMEVCDKDHMFDDSLGTCT

SEQ ID NO: 431 - protein, 80 aa, Artificial Sequence
  Synthetically generated peptide
AKVEIGADMKPSDPNGLADPYVKGHLGPYRFQTKIHKKTLNPKWMEEFKIPVTSWAALNLLSLQVRDKDPIFDDTLGDCS

SEQ ID NO: 432 - protein, 82 aa, Artificial Sequence
  Synthetically generated peptide
ALVEVVEACDVKPSDLNGLADPYVKGQLGAYRFKTKILWKTLAPKWQEEFKIPICTWDSANILNIEVQDKDRFSDDSLGDCS

SEQ ID NO: 433 - protein, 82 aa, Artificial Sequence; identical to SEQ ID NO: 432
  Synthetically generated peptide

SEQ ID NO: 434 - protein, 82 aa, Artificial Sequence
  Synthetically generated peptide
VLVEVFEASDLKPSDLNGLADPYVKGKLGAYRFKTKIQKKTLSPKWHEEFKIPIFTWDSPSILNIEVGDKDRFVDDTLGECS

SEQ ID NO: 435 - protein, 82 aa, Artificial Sequence; identical to SEQ ID NO: 434
  Synthetically generated peptide

SEQ ID NO: 436 - protein, 82 aa, Artificial Sequence
  Synthetically generated peptide
VLVEVFEASDLKPSDLNGLADPYVKGKLGAYRFKTKIQKKTLSPKWHEEFKIPIFTWDSPSILNIEVGDKDRFVDDTLGFAP

SEQ ID NO: 437 - protein, 79 aa, Artificial Sequence
  Synthetically generated peptide
LCVHVLERLQAAYLTGHSDPYVRLQMGRRRAKTTVVKRCLSPLWDEEFGFAVGDAEEELVVSVLNEEGYFGGGFLGRVK

SEQ ID NO: 438 - protein, 79 aa, Artificial Sequence
  Synthetically generated peptide
LQVRVVERLPAVRVDGTSDPFVKLQLGKRRAKTAVARRTLAPAWDEEFSFLVGDIAEELVVSVLNEDKYFSNDLLGKVR

SEQ ID NO: 439 - protein, 81 aa, Artificial Sequence
  Synthetically generated peptide
LQVRVVEARNLPAMDLNGFSDPYVRLQLGKQRSRTKVVKKNLNPKWTEDFSFGVDDLNDELVVSVLDEDKYFNDDFVGQVR

SEQ ID NO: 440 - protein, 81 aa, Artificial Sequence
  Synthetically generated peptide
LNVRVIEARNLRAMDSNGFSDPYVKLQLGKQRFKTKVVKKNLNPAWDQEFSFSVGDVRDVLKLYVYDEDMIGIDDFLGQVK

SEQ ID NO: 441 - protein, 82 aa, Artificial Sequence
  Synthetically generated peptide
LLVQVSEARNLPAIDGGGGLSDPYAKLQLGRQRGKTRVAKRTLSPTWDEEFAFRVVDLKDELVVVVVDEDRYFSDDFLGQVR

SEQ ID NO: 442 - protein, 65 aa, Artificial Sequence
  Synthetically generated peptide
LCVSVIEARNVQADDFAGKNFYVKLRVGSNEVKTDVVKGSLAPKFLKDCRLAVPTPESDYLRIEL

SEQ ID NO: 443 - protein, 81 aa, Artificial Sequence
  Synthetically generated peptide
VKVELLAAKNLIGANLNGTSDPYAIVNCGSEKRFSSMVPGSRNPMWGEEFNFPTDELPAKINVTIHDWDIIWKSTVLGSVT

SEQ ID NO: 444 - protein, 81 aa, Artificial Sequence; identical to SEQ ID NO: 443
  Synthetically generated peptide

SEQ ID NO: 445 - protein, 81 aa, Artificial Sequence
  Synthetically generated peptide
VKLELLAAKNLIAANLNGTSDPYALITCGEEKRFSSMVPGSRNPMWGEEFNFFVDSLPVKINVTIYDWDIVWKSTVLGSVI

SEQ ID NO: 446 - protein, 91 aa, Artificial Sequence
  Synthetically generated peptide
IKLELLCAKYLIGANLNGSSDPYAVISCGEQRRFSSMVPSSRNPLWGEEFNFLVRELPVEFCTAPVNDSKVTITMYDWDTVCKCKVIGSVT

SEQ ID NO: 447 - protein, 31 aa, Artificial Sequence
  Synthetically generated peptide
LEVHLLEAHGLLDTDTFGKSDPYAIVYCQKE

SEQ ID NO: 448 - protein, 79 aa, Artificial Sequence
  Synthetically generated peptide
IELVLVEARDLVAADIRGTSDPYVRVQYGEKKQRTKVIYKTLQPKWNQTMEFPDDGSSLELHVKDYNTLLPTSSIGNCV

SEQ ID NO: 449 - protein, 79 aa, Artificial Sequence; identical to SEQ ID NO: 448
  Synthetically generated peptide

SEQ ID NO: 450 - protein, 83 aa, Artificial Sequence
  Synthetically generated peptide
LVVIVHEAQDVEGKHHTNPQARLIFRGEEKKTKRIKKNRDPRWEDEFQFIAEEPPTNDKLHVEVVSSSSRTLLHQKESLGYVD

SEQ ID NO: 451 - protein, 83 aa, Artificial Sequence
  Synthetically generated peptide
LVVIVHEAQDVEGKHHTNPYVRIVFRGEERKTKHIKKNRDPRWEQEFQFVCEEPPINDKMQIEVISRPPSIGIHSKENLGYVV

SEQ ID NO: 452 - protein, 82 aa, Artificial Sequence
  Synthetically generated peptide
LVVIVHEAEDLEGKYHTNPSVRLLFRGEERKTKRVKKNREPRWDEDFQFPLDEPPINDKLHVEVISSSSRLIHPKETLGYVV

SEQ ID NO: 453 - protein, 65 aa, Artificial Sequence
  Synthetically generated peptide
FVVIVHSAEDVEGKHHTNPYVHIYFKGEERKTKHVKKNKDPKWNEEFSFMLEEPPIHEKMHVKVF

SEQ ID NO: 454 - protein, 65 aa, Artificial Sequence; identical to SEQ ID NO: 453
  Synthetically generated peptide

SEQ ID NO: 455 - protein, 65 aa, Artificial Sequence
  Synthetically generated peptide
LVVIVHSAEDVEGKHHTNPYVHIYFKGEERKTKNVKKNKDPKWNEEFSFMLEEPPVHEKLHVEVF

SEQ ID NO: 456 - protein, 84 aa, Artificial Sequence
  Synthetically generated peptide
  VARIANT 58: Xaa = any amino acid
LAVIVHSAEDVEGKHHTNPYVRIYFKGEERKTKHVKKNRDPRWEEEFTFMLEEPPVRXKLHVEVLSTSSRIGLLHPKETLGYVD

SEQ ID NO: 457 - protein, 84 aa, Artificial Sequence
  Synthetically generated peptide
LVVIVHSAEDVEGKHHTNPYVRIYFKGEERKTKHVKKNRDPRWNEEFTFMLEEPPVREKLHVEVLSTSSRIGLLHPKETLGYVD

SEQ ID NO: 458 - protein, 84 aa, Artificial Sequence
  Synthetically generated peptide
LYVVVHEAQDLEGKHHTNPYAKIIFKGEEKKTKVIKKNRDPRWEDEFEFVCEEPPVNDKLHIEVLSKASKKGLIHGKETLGYID

SEQ ID NO: 459 - protein, 64 aa, Artificial Sequence
  Synthetically generated peptide
LYVVVHEAKELEGKCNTNPYVKLTFKGVEKKTKVVKENRNPRWKEEFEFECEETPANDKLHVEV

SEQ ID NO: 460 - protein, 84 aa, Artificial Sequence
  Synthetically generated peptide
LSVAVQSAKDVEGKKKHSNPYAVVLFRGEKKKTKMLKKTRDPRWNEEFQFTLEEPPVKESIRVEVMSKGTGFHFRSKEELGHVD

SEQ ID NO: 461 - protein, 84 aa, Artificial Sequence; identical to SEQ ID NO: 460
  Synthetically generated peptide

SEQ ID NO: 462 - protein, 84 aa, Artificial Sequence; identical to SEQ ID NO: 460
  Synthetically generated peptide

SEQ ID NO: 463 - protein, 85 aa, Artificial Sequence
  Synthetically generated peptide
LLVSVENAEDVEGKRHTNPYAVVHFRGERKETKIIKKTRDPRWNEEFQFMVDEAPVDDKIHIEVVSKRRGLRLPFRNKESLGHVD

SEQ ID NO: 464 - protein, 87 aa, Artificial Sequence
  Synthetically generated peptide
LGVEVASAHDLMPKDGQGSASACVELTFDGQRFRTAIKDKDLNPVWNERFYFNVSDPSNLPELALEAYVYNINRSIDGSRSFLGKVR

SEQ ID NO: 465 - protein, 87 aa, Artificial Sequence
  Synthetically generated peptide
LGVEVASAHDLMPKDGQGSASACVELTFDGQRFRTAIKDKDLNPVWNERFYFNVSDPSNLPELALEAYVYNINRSVDGSRSFLGKVR

SEQ ID NO: 466 - protein, 86 aa, Artificial Sequence
  Synthetically generated peptide
LGVDVIGAHNLFPKDGQGTSNAYVELYFDGQKHRTTIKDRDLNPVWNESFFFNISDPSRLHYLNLEAQAYSHNRSTNGRSFLGKVS

SEQ ID NO: 467 - protein, 86 aa, Artificial Sequence; identical to SEQ ID NO: 466
  Synthetically generated peptide

SEQ ID NO: 468 - protein, 83 aa, Artificial Sequence
  Synthetically generated peptide
LGVEVTSAHDLLPKEQGTCNPYVEIEFDDQKFRTAIKERDINPVWNEQFYFNISDPSRLTEKDLEAYVYHANRNSKTCLGKVR

SEQ ID NO: 469 - protein, 86 aa, Artificial Sequence
  Synthetically generated peptide
LCVEVVGAHDLVAKDGEGSSTTFVELEFDDQKFRTTTKDKDLSPYWNEIFYFNITDPSKLSNLNLEACINHYNKTNGSKIPLGKVK

SEQ ID NO: 470 - protein, 59 aa, Artificial Sequence
  Synthetically generated peptide
LGVEVISAQGLLQRDKHNSCSPFVELKFDNQIFRATTKHNDPNPVWHECFYFVVSDPSV

SEQ ID NO: 471 - protein, 86 aa, Artificial Sequence
  Synthetically generated peptide
LGVEVISAQGLLQRDKHNSCSPFVELKFDNQIFRATTKHNDPNPVWHECFYFVVSDPSVLSTRTLEAHVYSYQNEFDAKPFLGKVR

SEQ ID NO: 472 - protein, 84 aa, Artificial Sequence
  Synthetically generated peptide
LGVEVISARLKPREDYGGVNAYVELRFDDQKVITMTKIDDSSPVWNEKFFFNISDTEDLSNQFLDAYVYNKTSSITKSCLGKIR

SEQ ID NO: 473 - protein, 82 aa, Artificial Sequence
  Synthetically generated peptide
LVVEVISADIPSSSNTSQTNYSVELHFNSQSKSTTIKENVAVWNERFSFDMRQREDPSGNLIAAVYCFDQMSNSKSLLGKVL

SEQ ID NO: 474 - protein, 92 aa, Artificial Sequence
  Synthetically generated peptide
VVVEVCNARNLMPKDGQGTASAYAVVDFDGQRRRTAWRDLNPQWGERLEFLVHDPDAMCAETLELNLYNDKKAIAATGGGGRRGGTFLGKVK

SEQ ID NO: 475 - protein, 84 aa, Artificial Sequence
  Synthetically generated peptide
LIVEICSARNLMPKDGQGTASAYAIVDFDGQRRRTKTKFRDLNPQWDEKLEFFVHDVATMGEEIINLCNDKKTGKRSTFLGKVK

SEQ ID NO: 476 - protein, 90 aa, Artificial Sequence
  Synthetically generated peptide
LVVEVVEARNILPKDGQGSSSAYVVVDFDAQKKRTSTKFRDLNPIWNEMLDFAVSDPKNMDYDELDIEVYNDKRFGNGGGRKNHFLGRVK

SEQ ID NO: 477 - protein, 90 aa, Artificial Sequence; identical to SEQ ID NO: 476
  Synthetically generated peptide

SEQ ID NO: 478 - protein, 95 aa, Artificial Sequence
  Synthetically generated peptide
LAVEVVDARDLVPKDGLGTSSAFAVVDFDGQRKRTRTVPRDLSPQWHERLEFAVHDPAAMHAEALDVSLYHDRRFNPSGGGGGGGGKNHFLGRVR

SEQ ID NO: 479 - protein, 87 aa, Artificial Sequence
  Synthetically generated peptide
LIVEVINAHDLMPKDGEGSASTFVEVDFENQLSRTRTVPKNLNPTWNQKLVFNLDTTKPYHHKTIEVSVYNDRRQPNPGRNFLGRVR

SEQ ID NO: 480 - protein, 85 aa, Artificial Sequence
  Synthetically generated peptide
LVVHVVDAQYLMPRDGQGSDFVEVDFLNQLSKTRTVPKSLNPVWNQKLYFDYDQSVINQHNQHIEVSVYHERRPIPGRSFLGRVK

SEQ ID NO: 481 - protein, 97 aa, Artificial Sequence
  Synthetically generated peptide
LVVEVVAAHNLMPKDGQGSSSAYVEVEFEHQRRRTRARPKELNPVWNERLVFAVADPDDLPYRAIDVGVYNDRAASGGVAGGGGAAPHGRNFLGKVR

SEQ ID NO: 482 - protein, 86 aa, Artificial Sequence
  Synthetically generated peptide
LVVEIVGAHNLMPKDGEDSSSPFVEVQFENQRLRTKVKPKDLNPIWNEKLVFHVIDVNDLRHKALEINVYNEKRSSNSRNFLGKVR

SEQ ID NO: 483 - protein, 84 aa, Artificial Sequence
  Synthetically generated peptide
LVVEIVDASDLMPKDGQGSDFVEVEFDEQRQRTQTRFKDLNPQWNEKLVFNVGDLKRLNNKTVDVTVYDDRRDNQPGKFLGRVK

SEQ ID NO: 484 - protein, 91 aa, Artificial Sequence
  Synthetically generated peptide
VGVEILDASELAPKDGAGACNAFVEVEFDGQKQRTPTKPADRSPQWNHTLVFDVRDPSRLPSLPVDVSVHHDRSLTDHHATRLHTFLGRVR

SEQ ID NO: 485 - protein, 90 aa, Artificial Sequence
  Synthetically generated peptide
LVVEVVDAKDLTPKDGHGTSSPYVVLDYYGQRRRTRTIVRDLNPVWNETLEFSLAKRPSHQLFTDVLELDMYHDKNFGQTRRNNFLGRIR

SEQ ID NO: 486 - protein, 82 aa, Artificial Sequence
  Synthetically generated peptide
LNVRVVRGSNLAICDPLTHTSDPYVVLHYGAQKVKTSVQKKNPNPVWNEVLQLSVTNPTKPVHLEVFDEDKFTADDSMGVAE

SEQ ID NO: 487 - protein, 82 aa, Artificial Sequence
  Synthetically generated peptide
LNVRVVRGSNLIIADPLTHTSDPYVVLSYGPQKVKTSVQKKNSNPVWNEVLQLAVTNPTKPVKLEVFDEDKFTADDSMGVAE

SEQ ID NO: 488 - protein, 80 aa, Artificial Sequence
  Synthetically generated peptide
LKVRVMRQLAICDPLTHSSDPYVVLRHGSQKVKSSIRYHSINPEWNEELTLSITNMMLPVKIEVFDKDTFTKDDSMGDAE

SEQ ID NO: 489 - protein, 80 aa, Artificial Sequence
  Synthetically generated peptide
LKIRVVRGINLAYRDTRGSDPYVVLRLGKQKVKTSVKKKSVNPIWHEELTLSIMNPIAPIKLGVFDKDTFSRDDPMGDAE

SEQ ID NO: 490 - protein, 79 aa, Artificial Sequence
  Synthetically generated peptide
SVRVLRGVNLVSRDAGGSDPYVVLHLDNQKLKTGVVKKTTNPVWNEELTLAVRNPETPIQLEVFDKDTFSKDDQMGDAE

SEQ ID NO: 491 - protein, 79 aa, Artificial Sequence
  Synthetically generated peptide
VKVRVVRGVNLAVRDLRSSDPYVIVRMGKQKLKTRVIKKTTNPEWNDELTLSIEDPAVPVRLEVYDKDTFIDDAMGNAE

SEQ ID NO: 492 - protein, 80 aa, Artificial Sequence
  Synthetically generated peptide
LRIRVKRGINLAQRDTLGSDPFVVITMGSQKLKTRVVENNCNPEWNEELTLALRHPDEPVNLIVYDKDTFTSHDKMGDAK

SEQ ID NO: 493 - protein, 80 aa, Artificial Sequence
  Synthetically generated peptide
LRIRVKRGINLAQRDTLSSDPFVVITMGSQKLKTRVVENNCNPEWNEELTLALRHPDEPVNLIVYDKDTFTSHDKMGDAK

SEQ ID NO: 494 - protein, 32 aa, Artificial Sequence
  Synthetically generated peptide
LRIRVKRGINLAQRDTLSSDPFVVITMGSQVF

SEQ ID NO: 495 - protein, 80 aa, Artificial Sequence
  Synthetically generated peptide
VRILVKRGIDLARRDALSSDPFVVITMGPQKLKSFTVKNNCNPEWNEELTLAIEDPNEPVKLMVYDKDTFTADDKMGDAQ

SEQ ID NO: 496 - protein, 80 aa, Artificial Sequence
  Synthetically generated peptide
LRIRVKRGINLVSRDSNTSDPFVVVTMGSQKLKTRGVENSCNPEWDDELTLGINDPNQHVTLEVYDKDTFTSHDPMGDAE

SEQ ID NO: 497 - protein, 80 aa, Artificial Sequence
  Synthetically generated peptide
LRVHVKRGINLAIRDATTSDPYVVITLANQKLKTRVINNNCNPVWNEQLTLSIKDVNDPIRLTVFDKDRFSGDDKMGDAE

SEQ ID NO: 498 - protein, 80 aa, Artificial Sequence
  Synthetically generated peptide
LTIHVKRGINLAIRDHRSSDPYIVLNVADQTLKTRVVKKNCNPVWNEEMTVAIKDPNVPIRLTVFDWDKFTGDDKMGDAN

SEQ ID NO: 499 - protein, 81 aa, Artificial Sequence
  Synthetically generated peptide
LKLRIKRGINLAIRDSNSSDPYVVVNIGHEQKLKTRVVKNNCNPEWNEELTLSIRDVRVPICLTVFDKDTFFVDDKMGDAE

SEQ ID NO: 500 - protein, 80 aa, Artificial Sequence
  Synthetically generated peptide
LRIRIKRGVNLAVRDISSSDPYVVVKMGKQKLKTRVINKDVNPEWNEDLTLSVTDSNLTVLLTVYDHDMFSKDDKMGDAE

SEQ ID NO: 501 - protein, 80 aa, Artificial Sequence
  Synthetically generated peptide
LRIRIKRGVNLAVRDLNSSDPYVVVKMAKQKLKTRVIYKNVNPEWNEDLTLSVSDPNLTVLLTVYDYDTFTKDDKMGDAE

SEQ ID NO: 502 - protein, 80 aa, Artificial Sequence
  Synthetically generated peptide
LRIRIKRGVNLAVRDVNTSDPYAVVKMGKQRLKTHVIKKDVNPEWNEDLTLSITDPVVPFKLTVYDYDTFSKDDKMGDAE

SEQ ID NO: 503 - protein, 80 aa, Artificial Sequence
  Synthetically generated peptide
LRIHVKRGVNLAIRDISSSDPYIVVHCGKQKLKTRVVKHSVNPEWNDDLTLSVTDPNLPIKLTVYDYDLLSADDKMGEAE

SEQ ID NO: 504 - protein, 80 aa, Artificial Sequence
  Synthetically generated peptide
LRLHVIRGVNLAIRDSQSSDPYVIVRMGKQKLRTRVMKKNLNTEWNEDLTLSVTDPTLPVKIMVYDRDRFSRDDKMGDAI

SEQ ID NO: 505 - protein, 80 aa, Artificial Sequence
  Synthetically generated peptide
LRVRVQRGVNLAVRDVSSSDPYVVLKLGRQKLKTKVVKQNVNPQWQEDLSFTVTDPNLPLTLIVYDHDFFSKDDKMGDAE

SEQ ID NO: 506 - protein, 80 aa, Artificial Sequence
  Synthetically generated peptide
LKVTIKKGTNLAIRDMMSSDPYVVLNLGKQKLQTTVMNSNLNPVWNQELMLSVPESYGPVKLQVYDYDTFSADDIMGEAD

SEQ ID NO: 507 - protein, 80 aa, Artificial Sequence; identical to SEQ ID NO: 506
  Synthetically generated peptide

SEQ ID NO: 508 - protein, 80 aa, Artificial Sequence
  Synthetically generated peptide
LKVTIKKGTNMAIRDMMSSDPYVVLTLGQQKAQSTVVKSNLNPVWNEELMLSVPHNYGSVKLQVFDYDTFSADDIMGEAE

SEQ ID NO: 509 - protein, 80 aa, Artificial Sequence; identical to SEQ ID NO: 508
  Synthetically generated peptide

SEQ ID NO: 510 - protein, 80 aa, Artificial Sequence; identical to SEQ ID NO: 508
  Synthetically generated peptide

SEQ ID NO: 511 - protein, 80 aa, Artificial Sequence
  Synthetically generated peptide
LKVKVVKGTNLAIRDMRTSDPYVVLKLGQQTVQTTVIRSNLNPVWNEELMLSVPQQFGPISLEVFDHDLFSADDIMGEAQ

SEQ ID NO: 512 - protein, 80 aa, Artificial Sequence
  Synthetically generated peptide
LNVKVKGGTNLAIRDMSSSDPYVVLTLGQQKAQTSVIKANLNPVWNEELKLSVPQQYGPLKLQAFDHDMLSKDDLMGEAE

SEQ ID NO: 513 - protein, 80 aa, Artificial Sequence
  Synthetically generated peptide
LNVKVKGGTNLAIRDMSSSDPYVVLTLGQQKAQTSVIKANLNPVWNEELKLSVPQQYGPLKLQVFDHDMLSKDDLMGEAE

SEQ ID NO: 514 - protein, 80 aa, Artificial Sequence
  Synthetically generated peptide
IKVKVIRGTKLAVRDILSSDPYVVLTLGQQKAKTKVIKSNLNPVWNEVLTLSVPQKYGPLKLQVYDHDVLSRDDIMGEAE

SEQ ID NO: 515 - protein, 80 aa, Artificial Sequence
  Synthetically generated peptide
LNITVVRGIQLAVRDMLTSDPYVVLTLGEQKAQTTVKPSDLNPVWNEVLKISIPRNYGPLKLEVYDHDTFSADDIMGEAE

SEQ ID NO: 516 - protein, 80 aa, Artificial Sequence
  Synthetically generated peptide
IKVDIRRGTNLAVRDVMSSDPYVMLNLGHQTMKTKVIKNTLNPVWNERLMLSIPHPVPPLKLQVFDKDTFSSDDRMGDVE

SEQ ID NO: 517 - protein, 80 aa, Artificial Sequence
  Synthetically generated peptide
IKVNVIRGTNLAVRDMMSSDPYVILNLGHQSMKTKVIKSSLNPVWNERILLSIPDPIPMLKLQVYDKDTFTTDDRMGEAE

SEQ ID NO: 518 - protein, 80 aa, Artificial Sequence
  Synthetically generated peptide
IKVNVVKGTNLAVRDVMTSDPYVILALGQQSVKTRVIKNNLNPVWNETLMLSIPEPMPPLKVLVYDKDTFSTDDFMGEAE

SEQ ID NO: 519 - protein, 80 aa, Artificial Sequence; identical to SEQ ID NO: 518
  Synthetically generated peptide

SEQ ID NO: 520 - protein, 80 aa, Artificial Sequence
  Synthetically generated peptide
IKVNVRKGTHLAIRDVVTSDPYVILSLGHQSVKTRVIRNNLNPVWNESLMLSIPENIPPLKVLVYDKDTFSTDDFMGEAE

SEQ ID NO: 521 - protein, 80 aa, Artificial Sequence
  Synthetically generated peptide
LQVTVIQGKKLVIRDFKSSDPYVIVKLGNESAKTKVINNCLNPVWNEELNFTLKDPAAVLALEVFDKDRFKADDKMGHAS

SEQ ID NO: 522 - protein, 80 aa, Artificial Sequence
  Synthetically generated peptide
LQVTVIRGKKLAIRDFKSSDPYVIVKLGNESAKTKVINNCLNPVWDEELSFTLKDPAAVLSLEVFDKDRFKADDKMGHAT

SEQ ID NO: 523 - protein, 80 aa, Artificial Sequence
  Synthetically generated peptide
LKVIVVQGKRLVIRDFKTSDPYVVLKLGNQTAKTKVINSCLNPVWNEELNFTLTEPLGVLNLEVFDKDLLKADDKMGNAF

SEQ ID NO: 524 - protein, 80 aa, Artificial Sequence
  Synthetically generated peptide
LKVVVASGTNLAVRDFTSSDPYVVVRLAAMNKKTKVINSCLNPVWNEEMSFSIEEPAGVIKFEVFDWDRFKYDDKMGHAF

SEQ ID NO: 525 - protein, 80 aa, Artificial Sequence
  Synthetically generated peptide
VKVKVVRGTNLAVRDVFSSDPYVVLKLGNQEVRTRTVRKNTNPVWNEDLTLIVQDLNHLLVTLEVYDRDPFVDDPMGAAF

SEQ ID NO: 526 - protein, 94 aa, Artificial Sequence
  Synthetically generated peptide
LELGILGAQGIVPMKTRDGKGSSDTYCVAKYGSKWVRTRTIVNNPGPKFNEQYTWEVYDPATVLTVGVFDNGQLGEKGGEKTSSSKDAKIGKVR

SEQ ID NO: 527 - protein, 94 aa, Artificial Sequence; identical to SEQ ID NO: 526
  Synthetically generated peptide

SEQ ID NO: 528 - protein, 88 aa, Artificial Sequence
  Synthetically generated peptide
LELGILNAVGLHPMKTREGRGTSDTFCVGKYGQKWVRTRTMVDNLCPKYNEQYTWEVFDPATVLTVGVFDNGQLGEKGNRDVKIGKIR

SEQ ID NO: 529 - protein, 88 aa, Artificial Sequence; identical to SEQ ID NO: 528
  Synthetically generated peptide

SEQ ID NO: 530 - protein, 50 aa, Artificial Sequence
  Synthetically generated peptide
RTISNSLDPKYHEQYTWEVFDPATVLTVGVFDNCQVNGPDNKDLLIGKVR

SEQ ID NO: 531 - protein, 73 aa, Artificial Sequence
  Synthetically generated peptide
RDGRGAADVYCVAKYGHKWVRTRTIVGSLSPKFHEQYYWEVYDPSTVLTLGVFNNGQLNDSNDSNDSKIGKVR

SEQ ID NO: 532 - protein, 91 aa, Artificial Sequence
  Synthetically generated peptide
LEIGILSATGLMPMKVRDGKCGGIADSYCVAKYGPKWVRTRTVVDSLCPKWNEQYTWEVYDPCTVVTVGVFDNARVNENNNSRDVRIGKVR

SEQ ID NO: 533 - protein, 71 aa, Artificial Sequence
  Synthetically generated peptide
LVLGVISASGSIPMKSRDGRGTTDAYCVAKYGQKWVRTRTIVDSLSPKWSEQYTWEVYDPYTVITVAVFDN

SEQ ID NO: 534 - protein, 93 aa, Artificial Sequence
  Synthetically generated peptide
LELGVLNATGLMPMKSRGGRGTTDAYCVAKYGTKWVRTRTIVDTFDPKWNEQYTWEVYDPYTVITIGVFDNLKLFGAGNENRLINDSRIGKIR

SEQ ID NO: 535 - protein, 92 aa, Artificial Sequence
  Synthetically generated peptide
LELGILNATGLMPMKTKDGRGTTDAYCVAKYGQKWIRTRTIIDSFTPRWNEQYTWEVFDPCTVVTVGVFDNCHLHGGEKIGGAKDSRIGKVR

SEQ ID NO: 536 - protein, 92 aa, Artificial Sequence; identical to SEQ ID NO: 535
  Synthetically generated peptide

SEQ ID NO: 537 - protein, 94 aa, Artificial Sequence
  Synthetically generated peptide
LELGVLNATGLMPMKAKEGGRGTTDAYCVAKYGQKWIRTRTIIDSFTPRWNEQYTWEVFDPCTVVTVGVFDNCHLHGGDKNNGGGKDSRIGKVR

SEQ ID NO: 538 - protein, 92 aa, Artificial Sequence
  Synthetically generated peptide
LELGILTAQGLLPMKTKDGRGTTDAYCVAKYGQKWVRTRTIIDSFTPKWNEQYTWEVYDPCTVITIGVFDNCHLNGGEKANGARDTRIGKVR

SEQ ID NO: 539 - protein, 94 aa, Artificial Sequence
  Synthetically generated peptide
LEVGILSAQGLSPMKTKDGKATTDPYCVAKYGQKWVRTRTIIDSSSPKWNEQYTWEVYDPCTVITLGVFDNCHLGGSEKSNSGAKVDSRIGKVR

SEQ ID NO: 540 - protein, 94 aa, Artificial Sequence; identical to SEQ ID NO: 539
  Synthetically generated peptide

SEQ ID NO: 541 - protein, 88 aa, Artificial Sequence
  Synthetically generated peptide
LEVGIISAHGLMPMKSKDGKGTTDAYCVAKYGQKWIRTRTIVDSFTPKWNEQYTWEVFDTCTVITFGAFDNGHIPGGSGKDLRIGKVR

SEQ ID NO: 542 - protein, 93 aa, Artificial Sequence
  Synthetically generated peptide
LEMGILGAKGLLPMKMKDGHGSTDAYCVAKYGQKWIRTRTLLDTFSPKWNEQYTWEVYDPCTVITLGVFDNCHLGEKAPSGSSIKDSRIGKVR

SEQ ID NO: 543 - protein, 98 aa, Artificial Sequence
  Synthetically generated peptide
LEVGILGAQKLLPMKMNNSRGSTDAYCVAKYGQKWIRTRTILDTFSPKWNEQYTWEVYDPCTVITLGVFDNCHLGGGGEKAPSGGSNAARDSRIGKVR

SEQ ID NO: 544 - protein, 93 aa, Artificial Sequence
  Synthetically generated peptide
LEIGILGANGLVPMKLKDGRGSTNAYCVAKYGQKWVRTRTILDTLSPRWNEQYTWEVYDPCTVITLGVFDNSHLGSAQSGTADSRDARIGKVR

SEQ ID NO: 545 - protein, 103 aa, Artificial Sequence
  Synthetically generated peptide
LEVGILGAAGLQPMKNRDGRGTTDAYCVAKYGQKWVRTRTMLGTFSPTWNEQYTWEVFDPCTVITIGVFDNNHLGNGNGNGNNAGGGGGGSPPARDARVGKIR

SEQ ID NO: 546 - protein, 86 aa, Artificial Sequence
  Synthetically generated peptide
LEMGILGAHGLPPMKSKDGWTTTDAYCVAKFGTKWVRTRTITNNFHPKWNEQYTWEVFDPCSIITIGVFDNNFHLQGGDKRIGKVR

SEQ ID NO: 547 - protein, 92 aa, Artificial Sequence
  Synthetically generated peptide
LEVGVLGAQGLPPMKTAADGGRGTTDAYCVAKYGHKWVRTRTVVDSSTPRWNEQYTWEVYDPCTVLTLAVFDNCNLGNGGGGGKDQRIGKVR

SEQ ID NO: 548 - protein, 96 aa, Artificial Sequence
  Synthetically generated peptide
LELGVLGATGLIPMKARDGRGATSDAYCVAKYGQKWIRTRTVVDSVCPRWNEQYTWEVFDPCTVITVGVFDNCHVDKPASGNTTLAVRDNCIGKVR

SEQ ID NO: 549 - protein, 86 aa, Artificial Sequence
  Synthetically generated peptide
LELGILSARNLMPMKGKDGRMTDPYCVAKYGNKWVRTRTLLDAPKWNEQYTWEVHDPCTVITIGVFDNSHVNDGGDFKDQRIGKVR

SEQ ID NO: 550 - protein, 86 aa, Artificial Sequence; identical to SEQ ID NO: 549
  Synthetically generated peptide

SEQ ID NO: 551 - protein, 88 aa, Artificial Sequence
  Synthetically generated peptide
LELGILGARNLIPMKGKDGRTTDAYCVAKYGPKWVRTRTILNTLNPQWNEQYTWEVFDPCTVITVVVFDNNQIGKNGDARDESIGKVR

SEQ ID NO: 552 - protein, 81 aa, Artificial Sequence
  Synthetically generated peptide
LELGILGARNLAGGKSPYCVAKYGAKWVRTRTLVGTAAPRWNEQYTWEVFDLCTVVTVAVFDNCHLTGGGDAKDQRIGKVR

SEQ ID NO: 553 - protein, 73 aa, Artificial Sequence
  Synthetically generated peptide
RKGTSDTYVVAKYGHKWVRSRTVINSMNPKYNEQYTWEVFDPATVLTICVFDNAHFAAGDGGNKRDQPIGKVR

SEQ ID NO: 554 - protein, 91 aa, Artificial Sequence
  Synthetically generated peptide
LELGILNANVFHSMKTREGKGTSDTYVVAKYGHKWVRSRTVINSMNPKYNEQYTWEVFDPATVLTICVFDNAHFAAGDGGNKRDQPIGKVR

SEQ ID NO: 555 - protein, 87 aa, Artificial Sequence
  Synthetically generated peptide
LELGILRIEQLSQEGKKETVDAYCVAKYGTKWVRTRTVTNCLNPRFNEQYTWEVYEPATVITIGVFDNNQINSGNGNKGDGKIGKIR

SEQ ID NO: 556 - protein, 91 aa, Artificial Sequence
  Synthetically generated peptide
LEVGILSANQPTKTKHERGSCDAYCVAKYGQKWVRTRTIVDNLNPRFNEQYTWDVFDHGTVLTIGLFDNCHADSNHSSSPGHMDKPIGKVR

SEQ ID NO: 557 - protein, 79 aa, Artificial Sequence
  Synthetically generated peptide
RDGRGSCDAYCVAKYGVKWYRTRTVTDSISPRFHQQYHWEVHDHCTVLTVAVFHNSQIGDKGGLVAGDPVKDVLLGKVR

SEQ ID NO: 558 - protein, 94 aa, Artificial Sequence
  Synthetically generated peptide
VELGIIGCKNLLPMKTVNGKGSTDAYTVAKYGSKWVRTRTVSDSLDPKWNEQYTWKVYDPCTVLTIGVFDSWGVYEVDGGKEATRQDLRIGKVR

SEQ ID NO: 559 - protein, 98 aa, Artificial Sequence
  Synthetically generated peptide
VELGIVGCKGLLPMRTADGKGCTDAYAVAKYGPKWARTRTISDSFDPAWNEQYTWPVYDPCTVLTVGVFDDPPPPSPSQLPDGAKDAAAFSRPMGKVR

SEQ ID NO: 560 - protein, 90 aa, Artificial Sequence
  Synthetically generated peptide
LELGILGRLLPMKAKNGGKGSTDAYCVAKYGKKWVRTRTITDSFDPRWHEQYTWQVYDPCTVLTVGVFDNWRMFSDASDDRPDTRIGKIR

SEQ ID NO: 561 - protein, 90 aa, Artificial Sequence; identical to SEQ ID NO: 560
  Synthetically generated peptide

SEQ ID NO: 562 - protein, 95 aa, Artificial Sequence
  Synthetically generated peptide
LELGIIGACGLLPMKTKGGAKGSTDAYCVAKYGKKWVRTRTVTDSLNPRWNEQYTWQVYDPCTVLTVAVFDNWRMFAFAGAGDEQRQDYRIGKVR

SEQ ID NO: 563 - protein, 98 aa, Artificial Sequence
  Synthetically generated peptide
LEVGIRGAANLVPMKIAKDGASGSTDAYVVLKYGPKWARTRTILDQFNPRWNEQYAWDVFDPCTVLTIAVFDNVRYRSAEASGDAGKLPKDARIGKLR

SEQ ID NO: 564 - protein, 93 aa, Artificial Sequence
  Synthetically generated peptide
LEVGIRGATNLLPVKTRDGTRGTTDAYVVAKYGPKWIRTRTILDRFNPRWNEQYTWDVYDPCTVLTIGVFDNGRYKRDESGKQGRDVRVGKIR

SEQ ID NO: 565 - protein, 87 aa, Artificial Sequence
  Synthetically generated peptide
LEIGILGATGLKGSDERKQGIDSYVVAKYGNKWARTRTVVNSVTPKWNEQYSWDDYEKCTVLTLGIYDNRQIFKEDQANDVPIGKVR

SEQ ID NO: 566 - protein, 86 aa, Artificial Sequence
  Synthetically generated peptide
LEIGILGATGLKGSDEKKQTIDSYVVAKYGNKWARTRTVVNSVSPKWNEQYSWDVYEKCTVLTLGIYDNRQIDKNKANDVPIGKVR

SEQ ID NO: 567 - protein, 83 aa, Artificial Sequence
  Synthetically generated peptide
VHLGILRATGLPLRMGKSTVNPYCVAKYGDKWVRTRTILDGPEHVFNEQHTWSVYDIATVLTAGVFDHFPHTRKAHREIGKVQ

SEQ ID NO: 568 - protein, 83 aa, Artificial Sequence
  Synthetically generated peptide
LSVTVISGEDLPAMDMNGKSDPYVVLSLKKSKTKYKTRVVSESLNPVWNQTFDFVVEDGLHDMLMLEVYDHDTFSRDYMGRCI

SEQ ID NO: 569 - protein, 83 aa, Artificial Sequence; identical to SEQ ID NO: 568
  Synthetically generated peptide

SEQ ID NO: 570 - protein, 46 aa, Artificial Sequence
  Synthetically generated peptide
RVVNESLNPVWNQTFDFVVEDGLHDMLVLEVYDHDTFSRDYMGRCI

SEQ ID NO: 571 - protein, 83 aa, Artificial Sequence
  Synthetically generated peptide
LSVTVISAEEIPIQDLMGKADPYVVLSMKKSGAKSKTRVVNDSLNPVWNQTFDFVVEDGLHDMLVLEVWDHDTFGKDYIGRCI

SEQ ID NO: 572 - protein, 83 aa, Artificial Sequence; identical to SEQ ID NO: 571
  Synthetically generated peptide

SEQ ID NO: 573 - protein, 83 aa, Artificial Sequence
  Synthetically generated peptide
LSVTVISAEDLPIVDFMGKADPFVVLALKKSEKKQKTRVVNETLNPVWNQTFDFVVEDGLHDMLIVELWDHDTFGKEKMGKVI

SEQ ID NO: 574 - protein, 83 aa, Artificial Sequence
  Synthetically generated peptide
LSVTVISAEDLPAVDFMGKSDPFVVLTLKKAETKNKTRVVNNSLNPVWNQTFDFVVEDGLHDMLLVEVYDHDTFGKDYMGRVI

SEQ ID NO: 575 - protein, 83 aa, Artificial Sequence
  Synthetically generated peptide
LSVTVISAEDLPPMDVMGKADPFVVLYLKKGETKKKTRVVTETLNPIWNQTFDFVVEDALHDLLMVEVWDHDTFGKDYIGRCI

SEQ ID NO: 576 - protein, 83 aa, Artificial Sequence; identical to SEQ ID NO: 575
  Synthetically generated peptide

SEQ ID NO: 577 - protein, 83 aa, Artificial Sequence
  Synthetically generated peptide
LSVTVVAAEDLPAVDFMGKADAFVVITLKKSETKSKTRVVPDSLNPVWNQTFDFVVEDALHDLLTLEVWDHDKFGKDKIGRVI

SEQ ID NO: 578 - protein, 82 aa, Artificial Sequence
  Synthetically generated peptide
LIVTVVKATNLKNKELIGKSDPYATIYIRPVFKYKTNAIDNNLNPVWDQTFELIAEDKETQSLTVEVFDKDVGQDERLGLVK

SEQ ID NO: 579 - protein, 82 aa, Artificial Sequence
  Synthetically generated peptide
LIVTVVKATNLKNKELIGKSDPYATIYIRPVFKYKTKAIENNLNPVWDQTFELIAEDKETQSLTVEVFDKDVGQDERLGLVK

SEQ ID NO: 580 - protein, 44 aa, Artificial Sequence
  Synthetically generated peptide
IENNLNPVWDQTFELIVEDKETQSLTVEVFDKDVGQDERLGLVK

SEQ ID NO: 581 - protein, 79 aa, Artificial Sequence
  Synthetically generated peptide
TVVKATNLKNKEFIGKSDPYATIHIRPVFKYNTKAIENNLNPVWDQTFDLIAEDKETQSLTIEVFDKDVGQDERLGLVK

SEQ ID NO: 582 - protein, 83 aa, Artificial Sequence
  Synthetically generated peptide
LTVTIVKANGLKNHEMIGKSDPYAVVHIRPLFKVKTKTIDNNLNPVWDQTFELIAEDKETQSLFIEVFDKDNIGQDQRMGVAK

SEQ ID NO: 583 - protein, 83 aa, Artificial Sequence
  Synthetically generated peptide
LTVTVVKATSLKNKELIGKSDPYVILYVRPMFKVKTKVIDDNLNPEWNETFPLIVEDKETQSVIFEVYDEDRLQQDKKLGVAK

SEQ ID NO: 584 - protein, 85 aa, Artificial Sequence
  Synthetically generated peptide
LEVKLVEARDLTNKDLVGKSDPFAVLYIRPLQDKMKKSKTINNDLNPIWNEHYEFVVEDTSTQRLTVKIYDDEGLQASELIGCAR

SEQ ID NO: 585 - protein, 85 aa, Artificial Sequence; identical to SEQ ID NO: 584
  Synthetically generated peptide

SEQ ID NO: 586 - protein, 85 aa, Artificial Sequence
  Synthetically generated peptide
LEVKLVQAKNLTNKDLVGKSDPFAKMFIRPLREKTKRSKTINNDLNPIWNEHFEFVVEDASTQHLVVRIYDDEGVQASELIGCAQ

SEQ ID NO: 587 - protein, 85 aa, Artificial Sequence; identical to SEQ ID NO: 586
  Synthetically generated peptide

SEQ ID NO: 588 - protein, 85 aa, Artificial Sequence
  Synthetically generated peptide
LEVKLVQARDLTNKDLIGKSDPFAIVYVRPLPDKMKRSKTINNDLNPIWNEHFEFIVEDADTQTVTVKIYDDDGIQESELIGCAQ

SEQ ID NO: 589 - protein, 85 aa, Artificial Sequence; identical to SEQ ID NO: 588
  Synthetically generated peptide

SEQ ID NO: 590 - protein, 85 aa, Artificial Sequence
  Synthetically generated peptide
LEVKLVQAKELTNKDIIGKSDPYAVLYIRPLRNRTKKSKTINNDLNPIWNEHFEFIVEDASTQHLFVKVYDDEGLQSSELIGCTD

SEQ ID NO: 591 - protein, 85 aa, Artificial Sequence
  Synthetically generated peptide
LDVKLVQAKNLSNKDIIGKSDPFAVVFVRPLRDKTKTSKIINNQLNPIWNEHFEFIIEDESTQHLTIRIFDDEGIQAAELIGCAQ

SEQ ID NO: 592 - protein, 85 aa, Artificial Sequence
  Synthetically generated peptide
LDVKVVQAKDLANKDMIGKSDPYAIVFIRPLPDRTKKTKTISNSLNPIWNEHFEFIVEDVSTQHLTVRVFDDEGVGSSQLIGAAQ

SEQ ID NO: 593 - protein, 82 aa, Artificial Sequence
  Synthetically generated peptide
KVVRAVGLRKKDMMGGADPYVKIKLSEDKIPSKKTTVKHKNLNPEWNEEHKFSVRDPQTQVLEFSVYDWGQLGKHDKMGMNV

SEQ ID NO: 594 - protein, 85 aa, Artificial Sequence
  Synthetically generated peptide
VHVKVVRAVGLRKKDLMGGADPFVKIKLSEDKIPSKKTTVKHKNLNPEWNEEFKFSVRDPQTQVLEFSVYDWEQVGNPEKMGMNV

SEQ ID NO: 595 - protein, 68 aa, Artificial Sequence
  Synthetically generated peptide
GMINPYVQIELSEDKISSKKTTVKHKNLNPEWNEEFKFSVRDPKTQVLEFNVYGWEKIGKHDKMGMNV

SEQ ID NO: 596 - protein, 85 aa, Artificial Sequence
  Synthetically generated peptide
LHVKVLHAMKLKKKDLLGASDPYVKLKLTDDKMPSKKTTVKHKNLNPEWNEEFNLVVKDPETQVLQLNVYDWEQVGKHDKMGMNV

SEQ ID NO: 597 - protein, 85 aa, Artificial Sequence
  Synthetically generated peptide
LSVKVIKAIKLKKKDLLGGSDPYVKLTLSGDKVPGKKTVVKHSNLNPEWNEEFDLVVKEPESQELQLIVYDWEQVGKHDKIGMNV

SEQ ID NO: 598 - protein, 85 aa, Artificial Sequence
  Synthetically generated peptide
LHVNIVRAVKLTKKDFLGKSDPYVKLKLTEEKLPSKKTSVKRSNLNPEWNEDFKLVVKDPESQALELTVYDWEQVGKHDKIGMSV

SEQ ID NO: 599 - protein, 85 aa, Artificial Sequence
  Synthetically generated peptide
LHVSILRARNLLKKDLLGTSDPYVKLSLTGEKLPAKKTTIKKRNLNPEWNEHFKLIVKDPNSQVLQLEVFDWDKVGGHDRLGMQM

SEQ ID NO: 600 - protein, 85 aa, Artificial Sequence; identical to SEQ ID NO: 599
  Synthetically generated peptide

SEQ ID NO: 601 - protein, 85 aa, Artificial Sequence; identical to SEQ ID NO: 599
  Synthetically generated peptide

SEQ ID NO: 602 - protein, 83 aa, Artificial Sequence
  Synthetically generated peptide
LHVKVIRAMNLLKMDLLGKSDPYVKLRLSGEKLPSKKTSIKMSNLNPEWNEHFRFIVKDPETQILRMFDWEKVKMHDKLGMQV

SEQ ID NO: 603 - protein, 79 aa, Artificial Sequence
  Synthetically generated peptide
LLVKVLRAQNLREKGPLGKRDPYVKLKMSGSKLPSKKTAVKHSNLNPEWNQEFKFVIRDPETQELDINFGKDEKLGMCK

SEQ ID NO: 604 - protein, 85 aa, Artificial Sequence
  Synthetically generated peptide
LLVKVLRAQNLRKKDLLGKSDPYVKLKMSDDKLPSKKTTVKRSNLNPEWNEDFKFVVTDPETQALEINVFDWEQVGKHEKMGMNN

SEQ ID NO: 605 - protein, 86 aa, Artificial Sequence
  Synthetically generated peptide
LSVTLVDAQKLRYMFFGKTDPYAILRLGDQVIRSKRNSQTTVIGAPGQPIWNQDFQFLVSNPREQVLQIEVNDRLGFADMAIGTGE

SEQ ID NO: 606 - protein, 86 aa, Artificial Sequence; identical to SEQ ID NO: 605
  Synthetically generated peptide

SEQ ID NO: 607 - protein, 86 aa, Artificial Sequence
  Synthetically generated peptide
LSVTLVNAQKLPYMFSGRTDPYVILRIGDQVIRSKKNSQTTVIGAPGQPIWNQDFQFLVSNPREQVLQIEVNDCLGFADMAIGIGE

SEQ ID NO: 608 - protein, 42 aa, Artificial Sequence
  Synthetically generated peptide
LSVTLVDARKLPYFFGKTDPYVILSLGDQTIRSKKNSQTTVI

SEQ ID NO: 609 - protein, 86 aa, Artificial Sequence
  Synthetically generated peptide
LSVTLVDARKLSFVLFGKTDPYVVMILGDQEIKSKKNSQTTVIGQPGEPIWNQDFHMLVANPRKQKLCIQVKDSVGLTDVTIGTGE

SEQ ID NO: 610 - protein, 84 aa, Artificial Sequence
  Synthetically generated peptide
FRCVNLDNKDLFSKSDPFLRISRVVETSAAVPICRTEVVDNNLNPMWRPVCLTMQQFGSKDTPLVIECLDFNTSGNHELIGKTE

SEQ ID NO: 611 - protein, 84 aa, Artificial Sequence; identical to SEQ ID NO: 610
  Synthetically generated peptide

SEQ ID NO: 612 - protein, 84 aa, Artificial Sequence
  Synthetically generated peptide
FRCVNLDNKDLFSKSDPFLRISRVVETSAAVPICRTEVVDNNLNPMWRPVCLTMQQFGSKDTPLVIECLDFNTSGNHELMKDRE

SEQ ID NO: 613 - protein, 83 aa, Artificial Sequence
  Synthetically generated peptide
VFRQLESKDTFSKSDPFLVISKIVEHGTPIPVSKTEVLKNDPNPLWKPVSLSVQQVGSKDSPLVIECLDFNGNGNHDLIGKVQ

SEQ ID NO: 614 - protein, 83 aa, Artificial Sequence; identical to SEQ ID NO: 613
  Synthetically generated peptide

SEQ ID NO: 615 - protein, 83 aa, Artificial Sequence; identical to SEQ ID NO: 613
  Synthetically generated peptide

SEQ ID NO: 616 - protein, 85 aa, Artificial Sequence
  Synthetically generated peptide
VFRCSNLESKDLFSKSDPFLVVSKIVEHGTPIPVSKTEVRKNDLNPIWKPVFLSVQQVGSKDSPVIIECSDFNSNGKHSLIGKVQ

SEQ ID NO: 617 - protein, 85 aa, Artificial Sequence; identical to SEQ ID NO: 616
  Synthetically generated peptide

SEQ ID NO: 618 - protein, 89 aa, Artificial Sequence
  Synthetically generated peptide
IMEMVFRCSDLEIKDLLSKSDPFLLISRISESGVPVPICKTEVRKNDLNPKWKPVILNLQQIGSKENPLIIECFNFSSNGKHDLIGKIV

SEQ ID NO: 619 - protein, 92 aa, Artificial Sequence
  Synthetically generated peptide
FSNLRDRDVISKSDAMVVVYTKGRDGTLAELFRSEVVLNSLNPKWIKNFTIGYQFEIVQTLLFRVYDIDTQFQNSKEELLKLDEQQFLGEAT

SEQ ID NO: 620 - protein, 92 aa, Artificial Sequence; identical to SEQ ID NO: 619
  Synthetically generated peptide

SEQ ID NO: 621 - protein, 92 aa, Artificial Sequence; identical to SEQ ID NO: 619
  Synthetically generated peptide

SEQ ID NO: 622 - protein, 92 aa, Artificial Sequence
  Synthetically generated peptide
FSNLRDRDVLSKSDPMVVVYQKEKDATLSEVFRSEVVLNSLAPKWIKKFIVAYHFETVQTLVFRVYDVDTKFQNSREEMLKLDEQQFLGEAT

SEQ ID NO: 623 - protein, 92 aa, Artificial Sequence; identical to SEQ ID NO: 622
  Synthetically generated peptide

SEQ ID NO: 624 - protein, 92 aa, Artificial Sequence
  Synthetically generated peptide
LSNLGDQEFFTKSNPMVIVYSKSKEGALEELGRTEVILNSLNPSWNARINVHYQFEVLQPIVFQVYDIDPQFHDVNEKMLKLEEQQFLGEAV

SEQ ID NO: 625 - protein, 92 aa, Artificial Sequence
  Synthetically generated peptide
LSNLLDCDITSKSDPMAVMYLRKKDGRLEEIGRTEVILNNLNPKWIEKITVSFQFEAVQTLVFHVYDVDTRYHNVPVKTLKLKDQDFLGEGT

SEQ ID NO: 626 - protein, 92 aa, Artificial Sequence; identical to SEQ ID NO: 625
  Synthetically generated peptide

SEQ ID NO: 627 - protein, 86 aa, Artificial Sequence
  Synthetically generated peptide
VNQLTLSNLLDCDITSKSDPMAVMYLRKKDGRLEEIGRTEVILNNLNPKWIEKITVSFQFEAVQTLVFHVYDVDTRYHNVPVKVIF

SEQ ID NO: 628 - protein, 93 aa, Artificial Sequence
  Synthetically generated peptide
FSASKLRNMDAFSKSDPMLVIYIRKDARLEEIGRTEVILNSLEPSWITKATISYQFEIIQPLVFKIYDIDTRYHNTPVKTLNLAQQDFLGEAC

SEQ ID NO: 629 - protein, 80 aa, Artificial Sequence
  Synthetically generated peptide
MTVIEGTGITNSNSKELFDMYAVFTCNAKRKTSSVKFQTSEPKWNEIYEFDAMDDPPSRMDVAIHDANGPFDQSPIGHAE

SEQ ID NO: 630 - protein, 80 aa, Artificial Sequence
  Synthetically generated peptide
LTVIEGSGVVGSGTPGLPDPYVVFTCNGKRKTSSVKFQTSEPKWNEIFEFNAMDDPPSRLEVVVHDSEGPHNKIPIGQTE

SEQ ID NO: 631 - protein, 81 aa, Artificial Sequence
  Synthetically generated peptide
LTVIEGTKLAPVDATGFSDPYVVFTCNGKSKTSSIKFQTLEPQWNDIFEFDAMDDPPSVMNVHVYDFDGPFDEVTSLGHAE

SEQ ID NO: 632 - protein, 81 aa, Artificial Sequence
  Synthetically generated peptide
LTVIDGTNLAATKSSGYSDPYVVFTCNGKTKTSSIKFHTLEPRWNEIFEFDAMEDPPSVMKINVYDFDGPFDEVESLGHAE

SEQ ID NO: 633 - protein, 81 aa, Artificial Sequence
  Synthetically generated peptide
LTVIEGVDLAAVDPSGHCDPYIVFTSNGKTRTSSIKFQKSNPQWNEIFEFDAMADPPSVLNVEVFDFDGPFDEAVSLGHAE

SEQ ID NO: 634 - protein, 83 aa, Artificial Sequence
  Synthetically generated peptide
LTIALIKGTNLASVEATELFDPYVVFTCNGKTRTSSVKLQAQDPQWNEVIEFDAMEEPPSVLDVEVFDFDGPFDQGASLGHAE

SEQ ID NO: 635 - protein, 80 aa, Artificial Sequence
  Synthetically generated peptide
LTVLEATSLPPVSSGSVDPYVVFSCNGITRTSSVQLQTHDPQWNEIMEFDAMEEPPATLDVEVFNFDGPFDLAVSLGHAE

SEQ ID NO: 636 - protein, 44 aa, Artificial Sequence
  Synthetically generated peptide
RRTKEPTWNEEFTFNISLSRENLLQVAAWDANLVTPHKRMGNAG

SEQ ID NO: 637 - protein, 65 aa, Artificial Sequence
  Synthetically generated peptide
GTSDPYVVMDLDGQVAKSKTKWGTKEPKWNEDFVFNIKLPPAKKIEIAAWDANLVTPHKRMGNSE

SEQ ID NO: 638 - protein, 94 aa, Artificial Sequence
  Synthetically generated peptide
LKVKIYTGEGWDLDFHHTHFDQYSPPDFFVKIGIAGVPRDTVSYRTETAVDQWFPIWGNDEFLFQLSVPELALLWFKVQDYDNDTQNDFAGQTC

SEQ ID NO: 639 - protein, 94 aa, Artificial Sequence; identical to SEQ ID NO: 638
  Synthetically generated peptide

SEQ ID NO: 640 - protein, 94 aa, Artificial Sequence; identical to SEQ ID NO: 638
  Synthetically generated peptide

SEQ ID NO: 641 - protein, 93 aa, Artificial Sequence
  Synthetically generated peptide
LKVKIYTGEGWNMDFPLDHFDRYSPPDFYAKVGIAGVPLDTASYRTEIDKDEWFPIWDKEFEFPLRVPELSLLCITVKDYDSNTQNDFAGQTC

SEQ ID NO: 642 - protein, 93 aa, Artificial Sequence; identical to SEQ ID NO: 641
  Synthetically generated peptide

SEQ ID NO: 643 - protein, 93 aa, Artificial Sequence
  Synthetically generated peptide
LKVKVCMGDGWLLDFKKTHFDSYSPPDFFVRVGIAGAPVDEVMEKTKIEYDTWTPIWNKEFTFPLAVPELALLRVEVHEHDVNEKDDFGGQTC

SEQ ID NO: 644 - protein, 93 aa, Artificial Sequence; identical to SEQ ID NO: 643
  Synthetically generated peptide

SEQ ID NO: 645 - protein, 93 aa, Artificial Sequence; identical to SEQ ID NO: 643
  Synthetically generated peptide

SEQ ID NO: 646 - protein, 93 aa, Artificial Sequence
  Synthetically generated peptide
LKVTVYMGDGWRFDFRKTHFDKCSPPDFYARVGIAGVEADTRMEQTKVKMDTWIPAWDHEFEFPLSVPELALLRVEVHESDNHQKDDFGGQTC

SEQ ID NO: 647 - protein, 93 aa, Artificial Sequence
  Synthetically generated peptide
LRVTVYMGEGWYFDFRHTHFDQYSPPDFYTRVGIAGVPGDTVMKKTKTLEDNWIPAWDEVFEFPLTVPELALLRLEVHEYDMSEKDDFGGQTC

SEQ ID NO: 648 - protein, 93 aa, Artificial Sequence; identical to SEQ ID NO: 647
  Synthetically generated peptide

SEQ ID NO: 649 - protein, 93 aa, Artificial Sequence; identical to SEQ ID NO: 647
  Synthetically generated peptide

SEQ ID NO: 650 - protein, 93 aa, Artificial Sequence
  Synthetically generated peptide
LRVTIYMGEGWYFDFRHTHFDQYSPPDFYTRVGIAGVPADTVMKKTKTLEDNWVPSWDEVFEFPLTVPELALLRLEVHEYDMSEKDDFGGQTC

SEQ ID NO: 651 - protein, 93 aa, Artificial Sequence
  Synthetically generated peptide
LRVTIYMGEGWYYDFPHTHFDRYSPPDFYTRVGIAGVPADTVMKKTKTLEDNWIPAWDEVFEFPLTVPELALLRIEVHEYDMSEKDDFGGQIC

SEQ ID NO: 652 - protein, 93 aa, Artificial Sequence
  Synthetically generated peptide
LKVTVYMGEGWYYDFKHTHFDQYSPPDFYTRVGIAGVPNDTIMKRTKAIEDNWLPTWNEAFEFPLTVPELALLRIEVHEYDMSEKDDFGGQTC

SEQ ID NO: 653 - protein, 93 aa, Artificial Sequence
  Synthetically generated peptide
LKVTVYMGEGWYYDFKHTHFDQYSPPDFYTRVGIAGVPNDTIMKRTKAIEDNWLPTWNEVFEFPLTVPELALLRIEVHEYDMSEKDDFGGQAC

SEQ ID NO: 654 - protein, 93 aa, Artificial Sequence
  Synthetically generated peptide
LKVTVYMGEGWYYDFKHTHFDQYSPPDFYTRVGIAGVPSDTVMKKTKANKDNWLPTWNETFEFPLSVPELALLRIEVHEYDMSEKDDFGGQTC

SEQ ID NO: 655 - protein, 93 aa, Artificial Sequence
  Synthetically generated peptide
LKVTVYMGEGWYYDFKHTHFDQFSPPDFYARIGIAGVPFDTVMKKTKSIEDSWLPSWNEVFEFPLSVPELALLRIEVHEYDMSEKDDFGGQTC

SEQ ID NO: 656 - protein, 93 aa, Artificial Sequence
  Synthetically generated peptide
LKVTVYMGEGWYYDFKHTHFDQFSPPDFYARVGIAGVPFDTVMKKTKSIEDSWLPSWNEVFEFPLSVPELALLRIEVHEYDMSEKDDFGGQTC

SEQ ID NO: 657 - protein, 93 aa, Artificial Sequence
  Synthetically generated peptide
LKVTVYMGEGWYYDFDHTHFDQFSPPDFYARVGIAGVPFDTIMKKTKTVEDSWLPSWNEVFEFPLSVPELALLRIEVHEYDMSEKDDFGGQTC

SEQ ID NO: 658 - protein, 93 aa, Artificial Sequence; identical to SEQ ID NO: 657
  Synthetically generated peptide

SEQ ID NO: 659 - protein, 93 aa, Artificial Sequence
  Synthetically generated peptide
LKVTIYMGEGWFLDFKHTHFDKFSPPDFYARVGIAGVPNDTVMKKTEKVEDNWSPSWNQVFKFPLAVPELALLRVEVHEYDMSEKDDFGGQTC

SEQ ID NO: 660 - protein, 93 aa, Artificial Sequence
  Synthetically generated peptide
LKVTIYMGEGWFHDFKHTHFDQYSPPDFYARVGIAGVPYDTVMKKTKSVEDNWSPSWNEEFKFPLSVPELALLRVEVHEYDMSEKDDFGGQTC

SEQ ID NO: 661 - protein, 93 aa, Artificial Sequence
  Synthetically generated peptide
LKVTVFMGEGWYIDFKHTHFDAYTPPDFYAKIGIAGVPADNVMKKTKTLEDMDTPTWDEKFEFPLTVPELALLRVEVHEYDMSEKDDFAGQTC

SEQ ID NO: 662 - protein, 93 aa, Artificial Sequence
  Synthetically generated peptide
LKVTVFMGEGWYYDFNHTHFDAYAPPDFYAKIGIAGVPADNVMKKTRTLENNWIPTWDEKFEFPLTVPELALLRVEVHVYDMSEKDDFAGQTC

SEQ ID NO: 663 - protein, 93 aa, Artificial Sequence
  Synthetically generated peptide
LKVTVFMGEGWYYDFEHTHFDAYSPPDFYARIGIAGVDADIVMKKTKTLEDNWIPTWDEQFEFPLTVPELALLRVEVHEYDMSEKDDFAGQTC

SEQ ID NO: 664 - protein, 93 aa, Artificial Sequence
  Synthetically generated peptide
LKVKVYMGKGWHLDFKRTHFDAYSPPDFYVKIGIAGVAADSRVKKTKAIEDNWIPIWNDEFEFPLTVPELALLRVEVHEYDMSEIDDFGGQTC

SEQ ID NO: 665 - protein, 93 aa, Artificial Sequence
  Synthetically generated peptide
LKVKVYMGDGWRMDFSKTHFDTFSPPDFYTRVGIAGVRADCVMKKTRTIEDQWVPMWDEEFTFPLTVPELAVLRIEVHEYDMSEKHDFGGQTC

SEQ ID NO: 666 - protein, 93 aa, Artificial Sequence; identical to SEQ ID NO: 665
  Synthetically generated peptide

SEQ ID NO: 667 - protein, 93 aa, Artificial Sequence
  Synthetically generated peptide
LKVKVYMGDRWRMDFSKTHFDAFSPPDFYTKVGIAGVKADSVMKKTRVIEDQWVPMWDEEFTFLLTVPELALLRVEVQEYDMSEKHDFGGQTV

SEQ ID NO: 668 - protein, 93 aa, Artificial Sequence
  Synthetically generated peptide
LKVKVYMGDGWRMDFTQTHFDQYSPPDFYARVGIAGVPADSVMKRTRAIEDNWVPVWEEDFTFKLTVPEIALLRVEVHEYDMSEKDDFGGQTV

SEQ ID NO: 669 - protein, 93 aa, Artificial Sequence; identical to SEQ ID NO: 668
  Synthetically generated peptide

SEQ ID NO: 670 - protein, 93 aa, Artificial Sequence
  Synthetically generated peptide
LKVKVYMGDGWRMDFKSTHFDTYSPPDFYTRVGIAGVPADCTMKKTRTIEDDWTPVWDEELVFPLTVPELALLRIEVHEYDMSDKDDFGGQTC

SEQ ID NO: 671 - protein, 93 aa, Artificial Sequence
  VARIANT 41: Xaa = any amino acid
  Synthetically generated peptide
LKVKVYMGDGWRMDFKQTYFDAYSPPDFYTRIGIAGVPADXVMKRTKAIEDDWTPVWNEEFVFPLTVPEIALLRIEVHEYDMSEKDDFGGQTC

SEQ ID NO: 672 - protein, 91 aa, Artificial Sequence
  Synthetically generated peptide
LKVKVYMGDGWHLDFKQTHFDKPPDFYTRVGIAGVPADEIMKKTKTKEDKWTPVWDEAFTFPLTVPELALLRIEVHEYDMSEKDDFAGQTC

SEQ ID NO: 673 - protein, 91 aa, Artificial Sequence
  Synthetically generated peptide
LKVKVYMGDGWHLDFKQTHFDKPPDFYTRVGIAGVPADEIMKKTKTKEDKWTPVWDEEFTFPLTVPELALLRIEVHEYDMSEKDDFAGQTC

SEQ ID NO: 674 - protein, 89 aa, Artificial Sequence
  Synthetically generated peptide
LQVRVYMGDGWRLDFSHTHFDAYSPPDFYTKVIGVPADSRKKKTRIDDWCPVWDEEFNFPLTVPELALLRIEVREYDMSEKDDFGGQTC

SEQ ID NO: 675 - protein, 93 aa, Artificial Sequence
  Synthetically generated peptide
LKVKVYMGDGWRMDFSHTHFDAYSPPDFYTKMFIVGVPADNAKKKTKIIEDNWYPIWDEEFSFPLTVPELALLRIEVREYDMSEKDDFGGQTC

SEQ ID NO: 676 - protein, 92 aa, Artificial Sequence
  Synthetically generated peptide
LKVKVYMGEGWHKDFKQTHFDTYSPPDFYVEVGIAGVPLDSVMRKTKAVEDNWVPVWEEEFAFPLTVPEIAVLRVEVHEQDVSEDDFGGQTA

SEQ ID NO: 677 - protein, 93 aa, Artificial Sequence
  Synthetically generated peptide
LKVTVYMGDGWDKDFDQTHFDTYSPPDFYAKLGIAGVPADEVKKRTKTMDDNWIPSWDEQFEFPLTVPELALLRIKVLDYNLSDKDEFAGQTC

SEQ ID NO: 678 - protein, 93 aa, Artificial Sequence
  Synthetically generated peptide
LKVTVYMGDGWDKDFDQTDFDTYSPPDFYAKLGIAGVPADEVKKRTETIDDNWIPSWNEQFEFPLTVPELALLRIKVLDYNLSDKDEFAGQTC

SEQ ID NO: 679 - protein, 93 aa, Artificial Sequence
  Synthetically generated peptide
LKVKVYLGKGWSLDFSPSDFDSYSPPDFYVKVCIVGVPADMIKKKTSVISNNWFPVWNEEFDFPLTVPELALLGIEVREDDKHQKDDFGGQTC

SEQ ID NO: 680 - protein, 93 aa, Artificial Sequence
  Synthetically generated peptide
LKVKVYLGKGWSLDFSPSDFDSYSPPDFYVKVCIVGVPADMIKKKTSVISNNWFPVWNEEFDFPLTVPELALLRIEVREEDKHQKDDFGGQTC

SEQ ID NO: 681 - protein, 93 aa, Artificial Sequence
  Synthetically generated peptide
LKVKVYMGNGWSSDFSKTHFDSFSPPDFYTKVCIVGVPADKANKKTKVIQDNWFPVWDEEFEFPLTVPELALLRIEVREYDKHEKDDFGGQTC

SEQ ID NO: 682 - protein, 92 aa, Artificial Sequence
  Synthetically generated peptide
LKVKVYKGVGWRSDFSPTHFDRFSPPDFYTKVCIAGVGADSVKMKTSVKMDNWYPVWDEEFEFQLTVPELALLRIEVKDKDKGSDDFAGQTC

SEQ ID NO: 683 - protein, 92 aa, Artificial Sequence
  Synthetically generated peptide
LKVKVYKGVGWSSDFSPTHFDRFSPPDFYTKVSIAGVRADCAKKKTSVKMDNWNPIWDEEFEFRLTVPELALLRIEVKDKDQTKDDFAGQTC

SEQ ID NO: 684 - protein, 93 aa, Artificial Sequence
  Synthetically generated peptide
LKVKVYMGKGWDSGFQRTCFNTWSSPNFYTRVGITGVRGDKVMKKTKKEQKTWEPFWNEEFEFQLTVPELALLRIEVHDYNMPEKDDFSGQTC

SEQ ID NO: 685 - protein, 93 aa, Artificial Sequence; identical to SEQ ID NO: 684
  Synthetically generated peptide

SEQ ID NO: 686 - protein, 73 aa, Artificial Sequence
  Synthetically generated peptide
DLFSPPDFFTRLLVTGVPADVAKWKTSVIDDVWEPHWNEDHEFYLKCPELALLRIEVRDHDEGSQDEFEGQAC

SEQ ID NO: 687 - protein, 92 aa, Artificial Sequence
  Synthetically generated peptide
LKVKIYMGDGWIVDFKKRIGRLSKPDLYVRISIAGVPHDEKIMNTTVKNNEWKPTWGEEFTFPLTYPDLALISFEVYDYEVSTPDYFCGQTC

SEQ ID NO: 688 - protein, 92 aa, Artificial Sequence; identical to SEQ ID NO: 687
  Synthetically generated peptide

SEQ ID NO: 689 - protein, 92 aa, Artificial Sequence
  Synthetically generated peptide
LKVKIYMGDGWIVDFKKRIGRLSKPDLYVRISIAGVPHDENIMKTTVKNNEWTPTWGEEFTFPLTYPDLALISFEVYDYEVSTADAFCGQTC

SEQ ID NO: 690 - protein, 92 aa, Artificial Sequence; identical to SEQ ID NO: 689
  Synthetically generated peptide

SEQ ID NO: 691 - protein, 89 aa, Artificial Sequence
  Synthetically generated peptide
LKVTVLLGTDWHKNYDVFKKPGYFVKVAIHGMHDDEQKFKTHVCKRSREPHWEVEEFVFQIRVPKLAILRLEVREYDRIVRDDMVGQSC

SEQ ID NO: 692 - protein, 68 aa, Artificial Sequence
  Synthetically generated peptide
KQSVGNPSVFCKITLGNNPPRQTKVISTGPNPEWDESFSWSFESPPKGQKLHCKNKSKMGKSSFGKVT

SEQ ID NO: 693 - protein, 79 aa, Artificial Sequence
  Synthetically generated peptide
LVVTIKRGNNMKQSVGNPSVFCKITLGNNPPRQTKVISTGPNPEWDESFSWSFESPPKGQKLHCKNKSKMGKSSFGKVT

SEQ ID NO: 694 - protein, 79 aa, Artificial Sequence
  Synthetically generated peptide
LVVIIKRGNNMKQSVGNPSVYCKITLGNNPPRLTKVVSTGPNPEWDESFSWSFESPPKGQKLHCKNKSKVGKSKFGKVT

SEQ ID NO: 695 - protein, 79 aa, Artificial Sequence
  Synthetically generated peptide
LVVIVKRGNNMRQSVGIPSVYCKITLGNSPPKLTKVVSTGPNPEWEESFTWSFESPPKGQKLHCKNKSKVGKSKFGKVT

SEQ ID NO: 696 - protein, 79 aa, Artificial Sequence
  Synthetically generated peptide
LTVTIKRGNNLRQSVGNPSAFCKLTLGNNPPRLTKIVSTGATPEWDEAFAWAFDSPPKGQKLHCKNNSKFGKKSFGKVT

SEQ ID NO: 697 - protein, 81 aa, Artificial Sequence
  Synthetically generated peptide
LTVNVMRANNLKQSMATTNAFCQLTIGNCPPRQTKVVSNSTTPEWKEGFTWAFDVPPKGQKLHIICKSKSTFGKTTLGRVT

SEQ ID NO: 698 - protein, 81 aa, Artificial Sequence; identical to SEQ ID NO: 697
  Synthetically generated peptide

SEQ ID NO: 699 - protein, 81 aa, Artificial Sequence
  Synthetically generated peptide
LTVTILRGNNLKQTMGSTNAFCCLQIGNGPPRQTKVVNNSICPVWNEGFTWLFDIPPKGQKLYILCKSKNTFGKSTLGRVT

SEQ ID NO: 700 - protein, 77 aa, Artificial Sequence
  Synthetically generated peptide
LTVAIKRGDNLKRSNAFCRLIIDNCPTKKTKVVKRSSSPVWKESFTWDFAAPPRGQFLEIVCKSNNIFRNKNLGKVR

SEQ ID NO: 701 - protein, 88 aa, Artificial Sequence
  Synthetically generated peptide
LEVYVHQARDIHNICIYHKQDVYAKLCLTSDPDKSVSTKIINGGGRNPVFDDNVKLDVRVLDTSLKCEIYMMSRVKNYLEDQLLGFTL

SEQ ID NO: 702 - protein, 88 aa, Artificial Sequence; identical to SEQ ID NO: 701
  Synthetically generated peptide

SEQ ID NO: 703 - protein, 88 aa, Artificial Sequence; identical to SEQ ID NO: 701
  Synthetically generated peptide

SEQ ID NO: 704 - protein, 88 aa, Artificial Sequence
  Synthetically generated peptide
LEVFVHQARDIHNICIYHKQDVYAKLCLTNDPENSLSTKIINGGGQNPVFDDTLQFDVKNLDCSLKCEIFMMSRVKNYLEDQLLGFSL

SEQ ID NO: 705 - protein, 88 aa, Artificial Sequence; identical to SEQ ID NO: 704
  Synthetically generated peptide

SEQ ID NO: 706 - protein, 88 aa, Artificial Sequence; identical to SEQ ID NO: 704
  Synthetically generated peptide

SEQ ID NO: 707 - protein, 88 aa, Artificial Sequence
  Synthetically generated peptide
LDVFVHQARDIHNICIYHKQDVYAKLCLTSDPDVSCSTKVINGGGRNPVFDDGLRLDVRTVDASLKCEIWMLSRVRNYLEDQLLGFAL

SEQ ID NO: 708 - protein, 88 aa, Artificial Sequence
  Synthetically generated peptide
VDVYIHQARDIHKICIYHKQDVYAKISLTSDPENSVNTKIINGGGRNPVFNDNLRLSVRTVDSSLKCEIWMLSRVKNYLEDQLLGFAL

SEQ ID NO: 709 - protein, 90 aa, Artificial Sequence
  Synthetically generated peptide
VDVHVQSARDIQNICIYHKQDVYARLSLPGEGAPAASTQVINGGGRNPVFDQSLRLGVRAGDVDGALRCEVWMLSRVKNYLQDQLLGFAL

SEQ ID NO: 710 - protein, 91 aa, Artificial Sequence
  Synthetically generated peptide
LQVYVHNARNINNICIYDNQDVYAKFSLTYNPDDTISTRIIHRAGKNPEFNQKLMIDVTQIDAHAAVLKCEIWMMSRARHYMEDQLLGFAL

SEQ ID NO: 711 - protein, 92 aa, Artificial Sequence
  Synthetically generated peptide
LDIYVHGRIHNICIYAAQDVYARLALTSSPDDAPALDTRVAAGGGANPRFDERLPPLRVRRARLGTDVLKCEIWMRSCARRLLDDQLLGFAL

SEQ ID NO: 712 - protein, 85 aa, Artificial Sequence
  Synthetically generated peptide
LEIEVISAEGLKVDRKPLKKKTYSVVRIDEKSWASKVDELGGSYPIWKDRFDMEMPINASVRFISIEVYYRTSGSGRDKNVGYAK

SEQ ID NO: 713 - protein, 85 aa, Artificial Sequence; identical to SEQ ID NO: 712
  Synthetically generated peptide

SEQ ID NO: 714 - protein, 85 aa, Artificial Sequence
  Synthetically generated peptide
  VARIANT 26: Xaa = any amino acid
LEIEVISAEGLKVDRKPLKKKTYSVXRIDEKSWASKVDELGGSYPIWKDRFDMEMPINASVRFISIEVYYRTSGSGRDKNVGYAK

SEQ ID NO: 715 - protein, 82 aa, Artificial Sequence
  Synthetically generated peptide
LEIDLRSAEGLKLNRRPIKKKTFAVVKIDEKCRKSNLDESRRSNPTWNYKSEMPINGNEQFIFIEVFYRTGSGHDKKIGEAK

SEQ ID NO: 716 - protein, 82 aa, Artificial Sequence; identical to SEQ ID NO: 715
  Synthetically generated peptide

SEQ ID NO: 717 - protein, 82 aa, Artificial Sequence; identical to SEQ ID NO: 715
  Synthetically generated peptide

SEQ ID NO: 718 - protein, 91 aa, Artificial Sequence
  Synthetically generated peptide
LEVTLISAQGLKPPSGLRRRLLQAYAVAWVDAARRLQWDRAGGVDPEWHERLLFRVHEAADDSRAAVTVEIYAAPAGGWHIGGDSLVGSAR

SEQ ID NO: 719 - protein, 88 aa, Artificial Sequence
  Synthetically generated peptide
LEVTVISAQDLHRRLGRRVRAAYAVAWADAAHKLRTGVDLAGGADPTWNDRFLFRVEEAFLRSDTAAVTVEVRAPRRFGGDAVLGVTR

SEQ ID NO: 720 - protein, 83 aa, Artificial Sequence
  Synthetically generated peptide
LELNIISAQDLAPVSRKMKTYAVAWVHSKLTTRVDYTGGGNPTWNDKFVFRVSEDFLYADTSAVVVEIYALHWFRDVHVGTVR

SEQ ID NO: 721 - protein, 83 aa, Artificial Sequence
  Synthetically generated peptide
LELNIISAQDLAPVARKTKTYAVAWVHSKLTTRVDYNGGTNPTWNDKFVFRVNEEFLYADTSAVVIEIYALHWFRDVHVGTVR

SEQ ID NO: 722 - protein, 85 aa, Artificial Sequence
  Synthetically generated peptide
LELNIISAQELAPVARCMKTYAIAWIDPERKLTTRVDNTGGTSPTWNDKFVFRLDEEALYDATSIVVIEIYALHWFKDIHVGTVQ

SEQ ID NO: 723 - protein, 85 aa, Artificial Sequence
  Synthetically generated peptide
LELNVISAQDLAEVGRSMRTYAVAWVDPDRKLSTRVDSQSGTNPAWNDKFVFRVDEDFLYDENSTITIDIYAIHWFKDIHVGTAH

SEQ ID NO: 724 - protein, 87 aa, Artificial Sequence
  Synthetically generated peptide
LEINLISAQDLAPVSRNMKTYSVAWINTDPMRKLTTRVDQSNRANPIWNEKFVFRVNDKILYVDASAIVIEIYAAAWAKDALVGTVN

SEQ ID NO: 725 - protein, 87 aa, Artificial Sequence
  Synthetically generated peptide
LEINLISAQDLAPVSRNMKTYSVAWINTDPMRKLTTRVDQSNRANPIWNEKFVFRVNDKILDVDASAIVIEIYAAAWAKDALVGTVN

SEQ ID NO: 726 - protein, 88 aa, Artificial Sequence
  Synthetically generated peptide
LEINLISAQGLKEPTGKLRRLQTYASVWVDSSSKLRTRIDRIGSENPIWNDKFVFQVSPEFLSSETSGVSIEIYAVGYLRDHLIGTVR

SEQ ID NO: 727 - protein, 89 aa, Artificial Sequence
  Synthetically generated peptide
LEVTVVSGKHLKNVNWRRGDLRAYVVAYLDPSRRAAWDDVGGCKPAWNERVVLPLPPHLSPHDPSLLLSLDVFHSKPSDSPKPLVGSAR

SEQ ID NO: 728 - protein, 87 aa, Artificial Sequence
  Synthetically generated peptide
LVVTVVSAKHLKNVNWRNGDLKPYVVLYLDQDHPLSTRSDDSSSIKPVWNERITLPLTRSVHESVLNIEVFHSNSSDLAKTLVGSVR

SEQ ID NO: 729 - protein, 89 aa, Artificial Sequence
  Synthetically generated peptide
VEVTVSSARDLKNVNWRNGDLKPYAVLWVDDGAKCSTRVDLDNADNPNWDDKLTLPLPPSSRLDDALLYLDVVHANAAEGVKPLVGSAR

SEQ ID NO: 730 - protein, 89 aa, Artificial Sequence
  Synthetically generated peptide
VEVTVASARDLKNVNWRNGDLKPYAVVWIDDGAKCSTRVDLDNADNPTWDDKLTVPLPPSTRLDDAVLYLDVVHANATDGVKPLVGSAR

SEQ ID NO: 731 - protein, 89 aa, Artificial Sequence
  Synthetically generated peptide
VEVTVGAARDLKNVNWRNGDLKPYAVLWIDAGARCSTRVDLDNGENPTWDDKVVVPLPPASRLQDAVLYLDIVHANAPEGVKPLVGSAR

SEQ ID NO: 732 - protein, 88 aa, Artificial Sequence
  Synthetically generated peptide
VEVTISSAKDIKNVNWRNGPNKPYAVVWIDPKFKSSTRVDEDGNTCTTWNETFVIALPPANDDDDKVYINIVHAGREENTKPLIGSAH

SEQ ID NO: 733 - protein, 88 aa, Artificial Sequence; identical to SEQ ID NO: 732
  Synthetically generated peptide

SEQ ID NO: 734 - protein, 92 aa, Artificial Sequence
  Synthetically generated peptide
LELTLLSASDLRGVNLVSKMEVYAVVYLAGDPRARQRVATDRAGGRNPSWKGKDATVRLAVPASGAGSGAVRVLLRAERAGLGGDRDVGEVF

SEQ ID NO: 735 - protein, 86 aa, Artificial Sequence
  Synthetically generated peptide
LELTLISAKDLKDVNLLSKMEVYAVVSLSGDRRSRQRIATDRAGGRNPAWNAAPLRFTVPASGAGSLHVLLRAERALGDRDVGEVH

SEQ ID NO: 736 - protein, 86 aa, Artificial Sequence
  Synthetically generated peptide
LEVTLISARNLKKVNLITPMEVYAVVSVSGNPLARQCTLPDRHGGRNPTWNATLHLAVPAAAPGAFLHVLLRTERALGDRDVGEVF

SEQ ID NO: 737 - protein, 88 aa, Artificial Sequence
  Synthetically generated peptide
LEVTLHSARDLKNVNFISRMEVYAVATISGDPLTRQCTPPDPYGGRHPAWNATLRFTVPPTAASAAGCLHVLLRAERSLGDRDIGEVI

SEQ ID NO: 738 - protein, 91 aa, Artificial Sequence
  Synthetically generated peptide
LELTLVSASDLKKVTLFSRMHVYAVASISGSNVPMPMHGTHADRNGGSNPAWNTVLHFPVPARFDTRGLALHVQLRARRSFGGHRDVGDVF

SEQ ID NO: 739 - protein, 91 aa, Artificial Sequence; identical to SEQ ID NO: 738
  Synthetically generated peptide

SEQ ID NO: 740 - protein, 89 aa, Artificial Sequence
  Synthetically generated peptide
LEVTLVSAKNLKKVTMFSKMRVYAVASISGGDPRVPTTHADREGGRSPMWHAPLRFPIPDAGADMRAIALHVLLRAERVFGDSDVGEVF

SEQ ID NO: 741 - protein, 92 aa, Artificial Sequence
  Synthetically generated peptide
LELNVYSAKDLENVNLITKMDVYAVVWITGDDSRKNHKEKTPIDRTGESEPTWNHTVKFSVDQRLAHEGRLTLVVKLVCDRIFGDKDLGEVQ

SEQ ID NO: 742 - protein, 94 aa, Artificial Sequence
  Synthetically generated peptide
LELKIVSASDVNHIDATDKMDVYAVVSINGDTTQQKQAAKTPIDYDGGSNPTWNHTVKFSVNEREANEGLLTITVKLFSYWLEGDNDLYLGEVN

SEQ ID NO: 743 - protein, 90 aa, Artificial Sequence
  Synthetically generated peptide
LELNINSARNLLNVNLITKMNVFTAITINGENTRKKQKAKTTVDRYGGSNPTWNQTIKFSVDERSRGHSSLVMRVISRRVLGNKEIGRVN

SEQ ID NO: 744 - protein, 91 aa, Artificial Sequence
  Synthetically generated peptide
LELNIISAKDIKNVNLFSKMDVYAAVSLSGDPLHPQGATTHVHKDAGSNPTWNYPVKFSVNESLAKENRLSLEIKLISDRTLGDTVIGTVH

SEQ ID NO: 745 - protein, 92 aa, Artificial Sequence
  Synthetically generated peptide
LELVIKFAKNIEDVNAFSSMDVYASVAILKDRKVKNRINTPVAFAAYTNPKWNQMMKFSIDEKSAQEGRLMLLVELMSHRPFLGDKEIGFVR

SEQ ID NO: 746 - protein, 90 aa, Artificial Sequence
  Synthetically generated peptide
LDLTIISAEDLKDVQLIGKQDLYAVVSINGDARTKQKTKVDKDCGTKPKWKHQMKLTVDDAAARDNRLTLVFEIVADRPIAGDKPVGEVS

SEQ ID NO: 747 - protein, 90 aa, Artificial Sequence; identical to SEQ ID NO: 746
  Synthetically generated peptide

SEQ ID NO: 748 - protein, 99 aa, Artificial Sequence
  Synthetically generated peptide
LELTVYEADDLHNAIHGRIIKAAESLKESLGVHRLAHRIYVDVDVGAARVARTREVEFHPTNPVWNQSFRLHCAYPAAPVAFTVKSQHLVGAGVLGAAR

SEQ ID NO: 749 - protein, 99 aa, Artificial Sequence; identical to SEQ ID NO: 748
  Synthetically generated peptide

SEQ ID NO: 750 - protein, 38 aa, Artificial Sequence
  Synthetically generated peptide
SPKWNETFHIYSAHSISNIIFTVKQDNPIGATLIGRAY

SEQ ID NO: 751 - protein, 60 aa, Artificial Sequence
  Synthetically generated peptide
YATVDLDKARVGRTRMIGNQPSNPKWNETFEIYCAHYISNIVFTVKDDNPIGATLIGRAY

SEQ ID NO: 752 - protein, 100 aa, Artificial Sequence
  Synthetically generated peptide
LHVTIFEVDHLKAGSVVVFSESLRRTLRKPLVLAKGTPKIYASIDLDKARVGRTRMIENEPNNPKWNESFHIYCGHPSTNVIFTVKDDNPIGATLIGRAY

SEQ ID NO: 753 - protein, 100 aa, Artificial Sequence
  Synthetically generated peptide
LHATIFEVDKLKNIGGGNILSKIRQNFEETVGFGKGTTKLYATIDLEKARVGRTRIIEKEHVNPQWNESFHIYCAHLASDIIFTVKDDNPIGATLIGRAY

SEQ ID NO: 754 - protein, 100 aa, Artificial Sequence; identical to SEQ ID NO: 753
  Synthetically generated peptide

SEQ ID NO: 755 - protein, 98 aa, Artificial Sequence
  Synthetically generated peptide
LHATIYEVDELHGGGGGNFFSKLKQNIEETVGIGKGVTKLYATIDLEKARVGRTRIIENETTNPKWNESFHIYCGHLNIIFTVKDDNPIGATLIGRAY

SEQ ID NO: 756 - protein, 96 aa, Artificial Sequence
  Synthetically generated peptide
LHATIYEIDRLHTGGSSNVFSMLRQNFEEAVGIGKGQTKLYATIDLEKARVGRTRISEPSNPRWYESFHIYCAHKNVIFTVKDDNPIGATLIGRTY

SEQ ID NO: 757 - protein, 98 aa, Artificial Sequence
  Synthetically generated peptide
LHVTIYEVDQLHSGGGGNFFTKLKANIEETVGFGKGTPKIYASIDLEKARVGRTRMIEHEPNNPRWYESFHIYCAHMNVIFTVKDDNPIGATLIGRAY

SEQ ID NO: 758 - protein, 98 aa, Artificial Sequence
  Synthetically generated peptide
LHVTVYEVDRLHAGGGGNIFSKLRANIEEKVGFGKGTPKIYASIDLEKARVGRTRMIEHEPTNPRWYESFHIYCAHLNIIFTVKDDNPIGATLIGRAY

SEQ ID NO: 759 - protein, 98 aa, Artificial Sequence
  Synthetically generated peptide
LHVTVYEVDKLREGGGPNVFGKLMANIQETVGFGEGTPKIYATIDLEKSRVGRTRMIENEPQNPRWYESFHIYCAHHNIIFTVKDDNPIGATLLGRAY

SEQ ID NO: 760 - protein, 96 aa, Artificial Sequence
  Synthetically generated peptide
LHVTIYEVDKLHSGGGPHFFRKLVENIEETVGFGKGVSKLYATIDLEKARVGRTRINEQSNPRWYESFHVYCAHQNVIFTVKDDNPIGATLIGRAY

SEQ ID NO: 761 - protein, 97 aa, Artificial Sequence
  Synthetically generated peptide
LHVTIYEVDKLKTSGGNVFTKLVQNIEETVGFGKGVTKLYATIDLEKARVGRTRIIEKDHSNPRWYESFHIYCAHMNIIFTVKDDNPIGATLIGRAY

SEQ ID NO: 762 - protein, 101 aa, Artificial Sequence
  Synthetically generated peptide
LHATIYEVDDLHTGGLRSGFFGKILANVEETIGVGKGETQLYATIDLQRARVGRTRKIKDEAKNPKWYESFHIYCAHLASDIIFTVKDDNPIGATLIGRAY

SEQ ID NO: 763 - protein, 60 aa, Artificial Sequence
  Synthetically generated peptide
YATIDLQKARVGRTRKIKNEPKNPKWYESFHIYCAHLASDIIFTVKDDNPIGATLIGRAY

SEQ ID NO: 764 - protein, 60 aa, Artificial Sequence
  Synthetically generated peptide
YATIDLQKARVGRTRKITDEPKNPKWYESFHIYCAHMASDIIFTVKDDNPIGATLIGRAY

SEQ ID NO: 765 - protein, 101 aa, Artificial Sequence
  Synthetically generated peptide
LHATIYEVDHLHAEGGRSGFLGSILANVEETIGVGKGETQLYATIDLEKARVGRTRKITKEPKNPKWFESFHIYCGHMAKHVIFTVKDANPIGATLIGRGY

SEQ ID NO: 766 - protein, 99 aa, Artificial Sequence
  Synthetically generated peptide
LHVTIFEVDNLQGEEEGGHFFSKIKQHFEETVGIGKGTPKLYATIDLEKARVGRTRIIENEPKNPRWYESFHIYCAHMNVIFTIKDDNPFGASLIGRAY

SEQ ID NO: 767 - protein, 99 aa, Artificial Sequence; identical to SEQ ID NO: 766
  Synthetically generated peptide

SEQ ID NO: 768 - protein, 98 aa, Artificial Sequence
  Synthetically generated peptide
LHVTIYEVDNLQKEGGGHFFSKIKEHVEETIGFGKGTPAIYATVDLEKARVGRTRKIKNEPNNPRWYESFHIYCAHMNVIFTVKDDNPIGATLIGRAY

SEQ ID NO: 769 - protein, 99 aa, Artificial Sequence
  Synthetically generated peptide
LHATIYEVDKLHGSSGNFLRKITGKLEETVGLGKGVSKLYATVDLERARVGRTRVIEKEPSNPNWSESFHIYCAHVAANVIFTVKESNPIGASLIGRAY

SEQ ID NO: 770 - protein, 103 aa, Artificial Sequence
  Synthetically generated peptide
LHATIFEAASLSNPHRASGSAPKFIRKFVEGIEDTVGVGKGATKVYSTIDLEKARVGRTRMITNEPINPRWYESFHIYCAHMNVIFTVKIDNPIGATNIGRAY

SEQ ID NO: 771 - protein, 105 aa, Artificial Sequence
  Synthetically generated peptide
LHATIFEAESLSNPHRATGGAPKFIRKLVEGIEDTVGVGKGATKIYATVDLEKARVGRTRMISNEPVNPRWYESFHIYCAHMAADVIFTVKIDNSIGASLIGRAY

SEQ ID NO: 772 - protein, 105 aa, Artificial Sequence
  Synthetically generated peptide
LHVTIFEANSISHPDRKTGGAPKFFRKLVENIEETVGFGKGASMLYASVDLDKARVGRTRIIKDEPVNPKWYESFHIYCAHMAANVIFTVKDDNPIGATLIGRAY

SEQ ID NO: 773 - protein, 105 aa, Artificial Sequence; identical to SEQ ID NO: 772
  Synthetically generated peptide

SEQ ID NO: 774 - protein, 59 aa, Artificial Sequence
  Synthetically generated peptide
YATIDLGKARVGRTRLLDEHKNPRWYESFHIYCAHMASDVVFTVKADNPIGAELIGRAY

SEQ ID NO: 775 - protein, 99 aa, Artificial Sequence
  Synthetically generated peptide
LHVTIFEVDKLRTNFGREIFNKVVQGIEGAIGFNKTASTLYATIDLGKARVGRTRLLDEHKNPRWYESFHIYCAHMASDVVFTVKADNPIGAELIGRAY

SEQ ID NO: 776 - protein, 99 aa, Artificial Sequence
  Synthetically generated peptide
LHVTIFEVDRLHTNFGRDFFNKVVQGIEGAIGFNKAASRLYATIDLGKARVGRTRLLDDHKNPRWYESFHIYCAHMAANVIITVKFDNPIGAEVIGRAY

SEQ ID NO: 777 - protein, 59 aa, Artificial Sequence
  Synthetically generated peptide
YATVDIDKARVARTRTVEPTGTPRWKESFHIYCAHYAGDVIFTVKAENPVGATLIGRAY

SEQ ID NO: 778 - protein, 105 aa, Artificial Sequence
  Synthetically generated peptide
MHVTIFEAESLSNPSRPSSQAPQFLRKLVEGIEDTVGVGKGTSKVYATIGLDKARVGRTRTLADDTAAPRWYESFHVYCAHLATHVAFTLKAKNPIGASLLGVGY

SEQ ID NO: 779 - protein, 89 aa, Artificial Sequence
  Synthetically generated peptide
LEATIADHLSNPTRATGAAPGIFRKFVEGFEDSLGLGKGATRLYATIDLGRARVGRTRVVDDEPVNPRWYEVFHIYCAHFAADVVFSVK

SEQ ID NO: 780 - protein, 103 aa, Artificial Sequence
  Synthetically generated peptide
LEATIADHLSNPTRATGAAPGIFRKFVEGFEDSLGLGKGATRLYATIDLGRARVGRTRVVDDEPVNPRWYEVFHIYCAHFAADVVFSVKAAQPIGATLIGRAY

SEQ ID NO: 781 - protein, 107 aa, Artificial Sequence
  Synthetically generated peptide
LDATIFEATNLTNPTRLTGNAPEGFRKWWEGLENGLEKTTGLGPGGTRLYATVDLGRARLGRTRVIDDEPVSPRWDERFHFYCAHFAENVVFSVKVSVDAKLIGRAY

SEQ ID NO: 782 - protein, 107 aa, Artificial Sequence; identical to SEQ ID NO: 781
  Synthetically generated peptide

SEQ ID NO: 783 - protein, 105 aa, Artificial Sequence
  Synthetically generated peptide
LDATIFEATNLTNPTRLTGSAPEGIRKWWEGVEKTTGVGQGGTRLYATVDLGKARLGRTRVIDDEPVNPRWDERFHLYCAHFADNVVFSVKVSLPIDAALIGRAY

SEQ ID NO: 784 - protein, 105 aa, Artificial Sequence; identical to SEQ ID NO: 783
  Synthetically generated peptide

SEQ ID NO: 785 - protein, 115 aa, Artificial Sequence
  Synthetically generated peptide
LDLTIVEARRLPNMDFMVNHLRSCLTCEPCKSPAQTAAKEGDSKIRGHRKIITSDPYVTVCLPQATVARTRVLKNSQNPKWNEHFIIPLAHPVTELDINVKDNDLFGADAIGTAK

SEQ ID NO: 786 - protein, 115 aa, Artificial Sequence; identical to SEQ ID NO: 785
  Synthetically generated peptide

SEQ ID NO: 787 - protein, 118 aa, Artificial Sequence
  Synthetically generated peptide
LDLTIIEARKLPNMDIVSNHLRKCLTCETCKAPSQAAAAQEPGEVGKVHHHHKIMTSDPYVTITVPQSTLARTPVLKSADNPEWNERFIIPMAHPLTELEINVKDDDLLGAEVIGTTK

SEQ ID NO: 788 - protein, 123 aa, Artificial Sequence
  Synthetically generated peptide
LDLKIVKARRLPNMDMFSEHLRRLFTACNACARPTDTDDVDPRDKGEFGDKNIRSHRKVITSDPYVTVVVPQATLARTRVLKNSQEPLWDEKFNISIAHPFAYLEFQVKDDDVFGAQIIGTAK

SEQ ID NO: 789 - protein, 123 aa, Artificial Sequence; identical to SEQ ID NO: 788
  Synthetically generated peptide

SEQ ID NO: 790 - protein, 123 aa, Artificial Sequence; identical to SEQ ID NO: 788
  Synthetically generated peptide

SEQ ID NO: 791 - protein, 113 aa, Artificial Sequence
  Synthetically generated peptide
LDLWVVEARLLPNMDMFSEHVRRCFAACKPPTSCATARQPRHRHHRRKIITSDPYVTLSVAGAVVARTRVIPNDQDPVWDERFAVPLAHYAAALEFHVKDNDTFGAQLIGTVT

SEQ ID NO: 792 - protein, 114 aa, Artificial Sequence
  Synthetically generated peptide
LDIWITEAKCLPNMDIMSMRRFFTGYGACGSSCAGDNARRGGVGVRPKKIITSDPYVSVCLAGATVAQTRVIPNSENPRWEERFRVEVAHAVSRLEFHVKDNDVFGAQLIGVAS

SEQ ID NO: 793 - protein, 116 aa, Artificial Sequence
  Synthetically generated peptide
LDIWITEAKCLPNMDIMSMRRFFTGYGACGSSCGGTGDNARRAGGGVRPKKIITSDPYVSVCLAGATVAQTRVIPNSENPRWEERFRVEVAHAVSRLEFHVKDNDVFGAQLIGVAS

SEQ ID NO: 794 - protein, 111 aa, Artificial Sequence
  Synthetically generated peptide
LDIQIVEAKCLPNMDLMTERMRKCFTGYGACSTECGKSDPHTDVRKIITSDPYVSVCLSGATVAQTRVIANSENPKWDEHFYVQVAHSVSRVEFHVKDNDVFGAELIGVAS

SEQ ID NO: 795 - protein, 112 aa, Artificial Sequence
  Synthetically generated peptide
LDLFIIEAKSLPNLDLSTEAIRKCLTMGNSCTPPFVKGLKTHSGKDKIITSDPYVSICLAGATIAQTRVIPNCENPLWDEHFLVPVAHPAHKIEFLVKDNDILGAELIGVVE

SEQ ID NO: 796 - protein, 85 aa, Artificial Sequence
  Synthetically generated peptide
LMVELLHGRRIRKVDGEKSSKFTSDPYVTVSISGAVIGRTFVISNSENPVWMQHFDVPVAHSAAEVHFVVKDNDPIGSKIIGVVG

SEQ ID NO: 797 - protein, 108 aa, Artificial Sequence
  Synthetically generated peptide
LDIWVKEAKHLPNMICYRNKLVGGISFSELGRRIRKVDGEKSSKFTSDPYVTVSISGAVIGRTFVISNSENPVWMQHFDVPVAHSAAEVHFVVKDNDPIGSKIIGVVG

SEQ ID NO: 798 - protein, 104 aa, Artificial Sequence
  Synthetically generated peptide
LDIWVKEAKHLPNMDGFHNRLGGMLSGLGRKKVEGEKSSKITSDPYVTVSISGAVIGRTFVISNSENPVWMQHFDVPVAHSAAEVHFVVKDSDIIGSQIMGAVG

SEQ ID NO: 799 - protein, 107 aa, Artificial Sequence
  Synthetically generated peptide
LDIWVKEAKHLPNMDGFHNTLVGGMFFGLGRRNHKVDGENSSKITSDPYVTVSISGAVIGRTFVISNSENPVWMQHFDVPVAHSAAKVHFVVKDSDIIGSQIIGAVE

SEQ ID NO: 800 - protein, 104 aa, Artificial Sequence
  Synthetically generated peptide
LDIWVREAKNLPNMDLFHKKLDNLLGGLAKLGSKKEGSPKITSDPYVTVSVSNAVVARTYVINNSENPIWMQHFYVPVAHYASEVHFVVKDNDVVGSQIIGAVG

SEQ ID NO: 801 - protein, 103 aa, Artificial Sequence
  Synthetically generated peptide
LDIWVSCANNLPNLDLFHKTLGVVFGGMTNMIEGQLSKKITSDPYVSISVAGAVIGRTYVISNSENPVWQQHFYVPVAHHAAEVHFVVKDSDAVGSQLIGIVT

SEQ ID NO: 802 - protein, 103 aa, Artificial Sequence
  Synthetically generated peptide
LDIWIYHAKNLPNMDMFHKTLGDMFGRLPGKIEGQLTSKITSDPYVSVSVAGAVIGRTYVMSNSENPVWMQHFYVPVAHHAAEVHFVVKDSDVVGSQLIGLVT

SEQ ID NO: 803 - protein, 95 aa, Artificial Sequence
  Synthetically generated peptide
LEIWVYEAKNLPNMDMFHKTIGDMFGQMSNKITSDPYVSINIADATIGRTYVINNNENPVWMQHFNVPVAHYAAEVQFLVKDDDIVGSQLMGTVA

SEQ ID NO: 804 - protein, 107 aa, Artificial Sequence
  Synthetically generated peptide
  VARIANT 86: Xaa = any amino acid
LDIWVLEANNLPNMDMFHRTLGDMFANFSSNISKKVGGRSDEKITSDPYVTIAVAGAVIGRTFVISNNENPVWMQHFNVPVAHHAXEVQFVVKDSDILGSDIIGVVA

SEQ ID NO: 805 - protein, 107 aa, Artificial Sequence
  Synthetically generated peptide
LDIWVLEANNLPNMDMFHRTLGDMFANFSSNISKKVGGRSDEKITSDPYVTIAVAGAVIGRTFVISNNENPVWMQHFNVPVAHHAAEVQFVVKDSDILGSDIIGVVA

SEQ ID NO: 806 - protein, 107 aa, Artificial Sequence
  Synthetically generated peptide
LDIWVLEAKNLPNMDMFHKTLGDMFGNFSSNISKKIGGRSEGKNTSDPYVTIAVSGAVIGRTFVINNDENPVWRQHFYVPVAHHAAEVQFVVKDIDILGSEIIGVVT

SEQ ID NO: 807 - protein, 105 aa, Artificial Sequence
  Synthetically generated peptide
LDVWVYDARNLPNKDLFSKRVGDLLGPRLIGAVGSKMSSANMTSDPYVTIQVSYATVARTYVVPNNENPVWTQNFLVPVGHDAAEVEFVVKDNDVFGAQLIGTVS

SEQ ID NO: 808 - protein, 105 aa, Artificial Sequence; identical to SEQ ID NO: 807
  Synthetically generated peptide

SEQ ID NO: 809 - protein, 101 aa, Artificial Sequence
  Synthetically generated peptide
LDIWIHEARNLPNMDIVSKTVVDILGTKKKKKAANGAMTSDPYVTVQLASATVARTYVVNDDENPVWAQHFLIPVAHEAPAVHFLVKDSDVFGAELIGEVV

SEQ ID NO: 810 - protein, 101 aa, Artificial Sequence; identical to SEQ ID NO: 809
  Synthetically generated peptide

SEQ ID NO: 811 - protein, 122 aa, Artificial Sequence
  Synthetically generated peptide
LDLTIHERLPNMDFLSTLLRRLCLCLRPPARRPSPGQSRGSVPADEDGRRQPHGHHLLPTSDPYAAVVVAGNTLARTHVVRDSEDPEWSTHVLLHLAHHATGVAFHVKDADPFGSDLIGVAI

SEQ ID NO: 812 - protein, 64 aa, Artificial Sequence
  Synthetically generated peptide
YVNIQFGDQIFTSKITQGKGKKVWWNEKFRFPLSSDECKELAKVTLKIMERDKFSEDSLVGETK

SEQ ID NO: 813 - protein, 64 aa, Artificial Sequence
  Synthetically generated peptide
LDVTLKSASDLREDMSVKLDAYCVVSCASTAHRSNTVTDAGKTMNWEQTFHFDKVASTSVLKLE

SEQ ID NO: 814 - protein, 92 aa, Artificial Sequence
  Synthetically generated peptide
LEINVTSAKGLKKVSKMDVFVAVKLSGDPKCSDHREQRTQAARDGGTSPKWSNDVMKFILDQNLAEANRLVITFKIKCEQRGGVDKDIGEVH

SEQ ID NO: 815 - protein, 90 aa, Artificial Sequence
  Synthetically generated peptide
VEINVLSAQDLNSINLLFRPTVYVSVSVTRGSRDKQVTPAAAWDKKFLRWNYRMKFYIEDDKVRRNESVFVFQIKCKRFFGSDQVVGKLF

SEQ ID NO: 816 - protein, 82 aa, Artificial Sequence
  Synthetically generated peptide
LYVYILQAKDLPAKETFAKLHVGRHKSKTRVARDTSSPIWNEEFVFRISDVDEGDDVVVSILHHEQQDHQSIVSTGLIGKVR

SEQ ID NO: 817 - protein, 84 aa, Artificial Sequence
  Synthetically generated peptide
LYIRVAKAKRAKNDGSNPVYAKLVIGTNGVKTRSQTGKDWDQVFAFEKESLNSTSLEVSVWSEEKIEKEDKTTTTTESCLGTVS

SEQ ID NO: 818 - protein, 102 aa, Artificial Sequence
  Synthetically generated peptide
MTVQIAKGLHIIDDGNSHSFFCTLRLVVDSQGAEPQKLFPQSARTKCVKPSTTIVNDLMECTSKWNELFIFEIPRKGVARLEVEVTNLAAKAGKGEVVGSLS

SEQ ID NO: 819 - protein, 99 aa, Artificial Sequence
  Synthetically generated peptide
IDLKIISCKDINAFNFFQKLTLYAQVSISTTNPKTKLTKQQQRTPTDTDDDGTNPEWNHQTRFNLSFLSSHPDPSEFFLSFEFRHDGLILGNKFLGECR

SEQ ID NO: 820 - protein, 84 aa, Artificial Sequence
  Synthetically generated peptide
VTIRSISCRGVKAFVPFQKPPLYAAVSLAGRREKTSGDPDGGENPDWDAAVFAFDLPAAADGMLQFEVKAQVPLLGSKLVGKVS

SEQ ID NO: 821 - protein, 91 aa, Artificial Sequence
  Synthetically generated peptide
FELRIIQARNIESVKSTKNLFARLYLPTGNNKRIQLNSKSVSTKSVPFWDESFNLDCSCPQEFLENLNQQSLEVELRQRKIWGSQLIGKFE

SEQ ID NO: 822 - protein, 102 aa, Oryza sativa
MSSDGGPVLGGVEPVGNENDLHLVDLARFAVTEHNKKANSLLEFEKLVSVKQQVVAGTLYYFTIEVKEGDAKKLYEAKVWEKPWMDFKELQEFKPVDASANA

SEQ ID NO: 823 - protein, 134 aa, Zea mays
MRKHRIVSLVAALLILLALAVSSTRNAQEDSMADNTGTLAGGIKDVPGNENDLHLQELARFAVDEHNKKANALLGFEKLVKAKTQVVAGTMYYLTIEVKDGEVKKLYEAKVWEKPWENFKELQEFKPVDEGASA

SEQ ID NO: 824 - protein, 125 aa, Triticum aestivum
LLAIVVPFTQTRTQSARDKAAMAEDAGPLVGGIKDSPMGQENDLDVIALARFAVSEHNNKANALLEFENVVKLKKQTVAGTMHYITIRVTEGGAKKLYEAKVWEKPWENFKQLQEFKPVEDAAIA

SEQ ID NO: 825 - protein, 140 aa, Hordeum vulgare subsp. vulgare
MWKYRVLGSVAALLLLLAVVVPFTQTWTQSARDKAAMAEDAGPLMGGIEDSPMGQENDLDVIALARFAVSEHNKKANALLEFENVVKLKKQTVAGTMYYITIRVTEGGTKKLYEAKVWEKLWENFKQLEEFKPVQDAAIA

SEQ ID NO: 826 - protein, 135 aa, Coix lacryma-jobi
MRKQRIVPLVAALLVLLALAVSSTRNAREEESMADDAGMLAGGIKDVPANENDLHLQELARFAVDEHNKKANALLGYEKLVKAKTQVVAGTMYYLTIEVKDGEVKKLYEAKVWEKPWENFKELLEFKPVEEDASA

SEQ ID NO: 827 - protein, 135 aa, Zea mays
MRKHRIVSLVAALLVLLALAAVSSTRSTQKESVADNAGMLAGGIKDVPANENDLQLQELARFAVNEHNQKANALLGFEKLVKAKTQVVAGTMYYLTIEVKDGEVKKLYEAKVWEKPWENFKQLQEFKPVEEGASA

SEQ ID NO: 828 - protein, 130 aa, Sorghum bicolor
ARVVPLVAALLVLLALAVSSTRNRNAQEGEESMALDGGIKDVPANENDLHLQELARFAVDEHNKKANALLGYEKLVKAKTQVVAGTMYYLTVEVKDGEVKKLYEAKVWEKPWENFKELQEFKPVEEGASA

SEQ ID NO: 829 - protein, 97 aa, Arachis hypogaea
AAVGAPREVAGNENSLEIDSLARFAVDEHNKKQNGLLEFKRVISAKQQVVAGTLHHITLEAASGDSKNVYEAKVWEKPWMNFKEVQEFKLAGDGSNA

SEQ ID NO: 830 - protein, 101 aa, Castanea sativa
AALVGGVSDVKGHENSLQIDDLARFAVDDHNKKANTLLQFKKVVNAKQQVVSGTIYILTLEVEDGGKKKVYEAKIWEKPWLNFKEVQEFKLIGDAPTHHSA

SEQ ID NO: 831 - protein, 105 aa, Saccharum officinarum
AEAHNGRRVGMVGDVRDAPAGHENDLEAIELARFAVAEHNSKTNAMLEFERLVKVRHQVVAGTMHHFTVQVKEAGGGKKLYEAKVWEKVWENFKQLQSFQPVGDA

SEQ ID NO: 832 - protein, 95 aa, Vigna unguiculata
AAGGNRDVAGNQNSLEIDSLARFAVEEHNKKQNALLEFGRVVSAQQQVVSGTLYTITLEAKDGGQKKVYEAKVWEKPWLNFKELQEFKHVGDAPA

SEQ ID NO: 833 - protein, 156 aa, Oryza sativa
MAGSGVLEVHFVDAKGLTGNDFLGKIDPYVVVQYRSQERKSSVARDQGKNPSWNEVFKFQINSTAATGQHKLFLRLMDHDTFSRDDFLGEATINVTDLISLGMEHGTWEMSESKHRVVLADKTYHGEIRVSLTFTASAKAQDHAEQVGGWAHSFRQ

SEQ ID NO: 834 - protein, 144 aa, Oryza sativa
MVQGTLEVLLVGAKGLENTDYLCNMDPYAVLKCRSQEQKSSVASGKGSDPEWNETFMFSVTHNATELIIKLMDSDSGTDDDFVGEATISLEAIYTEGSIPPTVYNVVKEEEYRGEIKVGLTFTPEDDRDRGLSEEDIGGWKQSS

SEQ ID NO: 835 - protein, 138 aa, Cucurbita maxima
MGMGMMEVHLISGKGLQAHDPLNKPIDPYAEINFKGQERMSKVAKNAGPDPIWNEKFKFLVEYPGSGGDFHILFKVMDHDAIDGDDYIGDVKIDVQNLLAEGVRKGWSELPPRMYQVLAHKIYFKGEIEVGVFFQRQG

SEQ ID NO: 836 - protein, 150 aa, Cucurbita maxima
MGMGMMEVHLISGKGLQAHDPLNKPIDPYAEINFKGQERMSKVAKNAGPNPLWDEKFKFLAEYPGSGGDFHILFKVMDHDAIDGDDYIGDVKIDVKNLLAEGVRKGKSEMPPRMYHVLAHKIHFKGEIEVGVSFKLQGGGGCGGCYPWEN

SEQ ID NO: 837 - protein, 147 aa, Arabidopsis thaliana
MPHGTLEVVLVSAKGLEDADFLNNMDPYVQLTCRTQDQKSNVAEGMGTTPEWNETFIFTVSEGTTELKAKIFDKDVGTEDDAVGEATIPLEPVFVEGSIPPTAYNVVKDEEYKGEIWVALSFKPSENRSRGMDEESYGGWKNSEASY
